United States Patent Application Publication US 2019/0348154 A1 - sequence listing, part 142

SEQ ID NO: 535087 - DNA, 1122 bp, Stenotrophomonas maltophilia
atgatcctgctgttcccgttgggcctggccgcgctcgccgcagggctgttgccgctgttgatccacctcgcccggcgccatccgtatacgccgctggatttcgccgcgctgcgctggctgcgtgcacagatccgtccgcgccagcgcatccgcttcgatgactggccgttgctgctggtgcgcctgttgctgctggcggcattggccttgctgctggcacgacctgcgttgatcggccctgccccggtccccactgcctggacggtagtggctcccggactggacgcgaccgcactgcgcggcaccgccgaatcgggcaactggcgttggctggcacccggcttccccgccatcgatcaggcaccgccggcatccagcgcatcgctgtccagcctgctgcgtgagctggatgcacagctgcccgcgggcaccgcgttgaccgtgcacgttcccgatcccctgcccggtctggatggcgcccgcctgcagctgtcgcgcgaggtgcaatggcatacgcagccgatgccggtcgcaccgccacagactgcagcggcactgccgcagctacgcgtacacggcgagccatccgccacagcccagcactggttgaacgcactgcagcgcgcgtggggcgtgcaggcactgccctcgcccttggcgggggatgccctgcccgaacgcggcgagatcggcgtctggagccgcagcgatgcactgccggcgagatggcagacatggctgcgcgacggcggtcgtgcagtgagcgctggcaaacctgctgccggcgccagcatcctgctgcgcaatgccgaaggcaccccactgctgtggcagcaacgcatcggccacggcgtcctgctgtcactgcccggcgactgggatgcctcaagcaacgctgcgctgcgcgacccgcagttgccgcgtgccctgctgctggcgctgcaagcgccccctccgccgcgcctcggcgatgcacgggaccaggcgccctatcgatctgcgctgcctgcggcaacaccgccggtgcgggagccaaccccctggttgctgctgaccatcgtgctgctgttcgcgctggagcgctggatggccagcagtagccgacgcagggtggccacatga

SEQ ID NO: 535088 - DNA, 534 bp, Stenotrophomonas maltophilia
atgagcgatccctttaccggcgaaatccagatgttcggcttcaatttcgctcccaacaactgggccatgtgccagggccagctgattcccatccagcagaacacagcgctgttctcgctgcttggcgtaacgtttggaggcaacggaaccagcaacttccagctgcctgatttctccggcaatgccgcctgcggacagggcagcggacccggcctgacgccacgcgtcatgggcgaggtcttcgggtcggacacggtgacgctgctctccaccgaaatgccggcgcactcgcacggagcccgcatctacaaccagcccaacaaggcccatcgcagcggcgtccccgcgaccaacgatgcgctgatcacgccggaaaaggcgtcgatcctcacccccaccaccaccgccaacagcgtctttccgcccaatacggtcggaatgacgggcggcaccgcaccgcacccgaatcagcagccttatctcaccgtgaacttctgcatctgcctgttcggcgtcttcccgcagcggccatga

SEQ ID NO: 535089 - DNA, 531 bp, Stenotrophomonas maltophilia
atgtcgcaaccctttgttggcgagatccgcttgtttccctacaacttcgcgccggtgggatggctcgactgcaatggccagacattgcagatttcagagtacgaagtgctgtataacttgatcggcaccacctacggcggcgatggcgcggtgacgttccagttgcccaacctttcaggccgtgtaccgatccaccagggcacaggccttgggttgggaacctacgtgatggggcaggccgcaggcactgagacggtgacgttgaccagcgcgcaccttcccgctcatacgcacgccttcaatgccgtcgatgcggtagccagttcagcgacaccgtcgtccaacctgcagttgggggcggtcagtggcgagacgctgtacaccgacagtgtcaccggcatcgcaggtggcctgctcgcgcctgcggcggtgggcagtgccggcggcaaccagccgcacgacaacaccatgccttcgctggtcgcgcgctactgcatcgcgtgggccggcgttttcccctcgcagggctga

SEQ ID NO: 535090 - DNA, 504 bp, Stenotrophomonas maltophilia
atgtcgcaaccctttctcgggcagataatgcccttggcgttcgcgttcgcgccaagaacctttgccttctgcaatgggcagctgatgcccatcgcgcagaaccaggcacttttttcgctgctgggcacgttctacggcggcaacggcacgaccaatttccagttgcctgacctgcgtagccgcacgcctgtcggcagcaacgctggcaccaatatcggccagcccggtggcgtggaaagtgtggtgttgaacgtttcccagatacctgcgcacaaccacagtttcaacggtacgaccagccctgccagtacccggattccggccggcaacgtactgctgggagcaaccggaacgcagaatgtctatggcccatccggtggcactccagtagcactcgcaccgctcgaccctgcaggccaatcggcggcgcattccaatatgcagccgtacctggcaatcaatttctgcattgcgctgcaaggcgtattcccctcgcgcagctga

SEQ ID NO: 535091 - DNA, 720 bp, Stenotrophomonas maltophilia
atgaacgctcttctttcgaagcggcgcgggaatctgttggcctggaaatggctggctgccgccgcgctgctcggcccggctgtgccgctgcaggcgtccacctttgccctgcagagcaatacggtgatcctggaggagcgcgagggacgtaccgcgttcaacatcagcaatcccggcagcgagccgatcctgctgctgagcagcgtggacgacctggacggccagccgatggccggcaacatcctggtgaccccggcggtgacccgcatcgacccgggccagagccagatcgtcaacttcacgctgaagaagggcacggtgctggatcgcgaatacatgctgcgggcgtcgttcgaaggtgtcacccagaagagcgagcgcggcatgcgcatgccgatccgccagcagatcggcttcatcctgcagccgcgtgcggttgccgttgcagcgcgtccctggcaggacctgcggttctccatcgatggcgatcagttgaccgtccgcaacagtggaccccatgtggtccggatcggccccgagttgcgcctgcagccctccgccgcgttgggcgtgctgccgcatccctacctgatgccgggcgaaacgcgtgtgctgaccctggcgggtgaagtgggcggcagcaaccggcacgtcgaaatcgtgccgctgagccgctatggcttcgccaaggacaaggaacaactgccgctgcagccgtga

SEQ ID NO: 535092 - DNA, 2412 bp, Stenotrophomonas maltophilia
atgaggcagtcgccgtcattggcgccggttgccgccctggtgatcggcgcgggaggaatgagtagcgccaccggagttgccgcacaggaggtgcagttcgacctcaagcagctggagcgcaatggcgtctcggccgacgttgcacgcttctttgcacgccgggccggctttctgccaggcgtgcaccaggtcgacgccagtgtgaacggcatgcgtcgcgagccgctgcaggtgcgtttcgatgctcagggtgagccttgtttctccgccgaagtgctggcgcagctgggcctgaaacaggacgacccggagcagatctgcgcgccgctgcagcagatccatcccggtacccgggtcgagcttcggccaggcagtgcgcggatggatctggtcgtgccggccacggccctgcgcgacagcagcgcgggcggtgcctttcagcgtggcggcagtgccctggttctcaactacgacgttttctcccaacgcgtgcagcgacgcacgggcaatgaccattctttgagtgcacgcatggaactgggattcaataccgccaactgggccgtacgcagccgcggcgactatgcacggcgtcgctcgcaaagccgctacgtgcagcaggaaacctatgcccagcgtgcgctggagcgtgcctcggcgttgttccaggcgggccagctgagcctggcctcggaaggcttcggtggcactccggtggtgggggcacagctgttttccgatgacatgcagcgccaggccagccgcctcagcgtgccgatcgagggcatcgccgacagccatgcggtggtggaagtgcgccagcgcggcagcgtcgtgcatcgcagcgtggtggcgccaggtgtctattcgatcagcgacatcgccgtgaccagccgtggtacggacctcgatgtggaagtccgggaagaggacgggcgcacgacccgctatcgggtaccggcaccgatggatgtgccggaggccgatgccgcgccagccttccagcttggggcggggcgctaccgtgcccgcgatggcgtgcacctgcagggcaatgctccctggctggtccacgccgggggcgccatgcagctgcacgctgatacccgtgtcagcacgtcgctgttgcttgcccgtggctaccagggattggcggcacagtccggcttcagccttgggtcgcgcagcatctggggcgtgggggcgcgtttctcgcatgccgcgcaatggggcttcggccacgagctgcagctgcagggcaatgccagcttcgacaatggactcagcctcggagcgtcctggcagcgccgcagcgctgcgttcgcaacgctggaagacacgttgtcgctgcgcgatacccggccgtggccgtgcgaaccctggaccttgccggaagcctgcgcttcgcgcagcgagcggctgcagcaatcgctgtcggcctcggtgggctggtccagcgctacctggggtgcgttttcctacacgttctggcagagccactatggcggcgatgttggccgcgggcagacgctgtcggcgtcacgccggttcggccgggtcaacgtcaacctgaccctgcagcatgcgcaggggcggggcagcgccgcgttcgtcaatctgcaggttccgttgggacgcggcagtgtcagtgcccgtgcctaccgctatgaagatgcgtcgcgcaacctgggggccagtttccagagccgcaccgcgggtggcctggcctacaacgtggatgcgtcgcacagcggttcgcagcagcggttggcggtcgcggccagccagcgcaccgcgtatggcgcattcaatgcgggggcctcgcatatccagggccaggcccagacccaatatctggccgccagcggcggtgtagcgctggcctcggggcgcacgttggcgttttccagctcgcgcattggtgacacctttgccgtggtccggattccacgtgtggccgggatcggcctgagcggcgccggcagtgccaccacctccgtgctgggtacggcggtgttgccgtcgatcaccccgtaccggcgaacccggttgcagctggaggggcgcacgctgccgctgaaccagcgctttgccagtaccacgcttgatctggcgctggcgcgcggcgccgtcgccacccacaccatcagtgcgcacccggtgcgccagctgctgctgaccgtgcgcacccgcggcggcgaactggcgcgggtgggtaccgcgctgtactccgccgaaggcgacttcattggcaccgtgatcggccagggcaacgcgatcctggacaacgaacagatcggcaagccggtgctgctggacgatgccagcggtcgctgtgaagtgcactacagcgtgccggcccggttcgatcccgcgcgtccctacgaggcgtccgaaggacgttgcctgtga

SEQ ID NO: 535093 - DNA, 648 bp, Stenotrophomonas maltophilia
atgagtaaagtccagctttcccttgccgcaaccgcgctggcactgctgtcggccggtgccgtgcacgcagaacccatcgcgccctcgaccctgaaggtcaccggcagcctggatgtaccggcctgcctggtcaccgctggcgatgacggcgtctacgactacggcagcctgggcccgggcgatatccgcaccggcaccacctacaacgtgcttcctgccatcagcaaggcctggaagatcgagtgcgaaggcgacacctacctgaccttcaaggtgaccgacaacgccgccgcgtcggccagtgcggtggactcgtcctacttcggcatgggtaacgtcaacggcaccggcaagctgggctactacacggtgaccatgcgcaacccgaaggtgaatggcaccgcatccaacgtgttcaccaccaacaccaccgccattacccgtgcggccacggcgccgttgcggcatagcagctacaccatgggctgggcgcagacggcggccaacctgcagcagatcggccgcgtgttcgagaccgatctggatgtggtcgccaaccttgccggcagccagaccatgggcggccccatcaccgaggacgcgaagctggaaggctcgctgaccctgaacttcgcctacggcctgtaa

SEQ ID NO: 535094 - DNA, 660 bp, Stenotrophomonas maltophilia
atgcgtacccctatgatccgctcctcgctcgcgctggtcctgctgtcggcctgcggcatggcctctgctgccattgcacccaaggacctggaggtgaccggcacggtgaagacgccgacctgcgtggtcagttccgacaaggatggcgtctacgactatggcaaggtcaacgccagcctcatcccgaccacgggctatctcacgctgtccaccatcgaccaggtgtggacggtggattgcggcagtggcaagaccttcatgtccttccaggtggtcgacaaccgcgaggcctccagctccagcgtcagctcgcagaacttcgggctgggcgcggtggcgggcttccccaccagcaagctgggctacttcacggtgaccctgaacggggccaaggtcgaccaggccaacgtcaatgtgctgcgcgggaccaagggcgcggcctccggcaccggtgccgccagcaccttcctggacaagaccctgtcgcacagctggaccacctcgggcaccaccggtgccctgccgctcagcggcagcgtgttctcgatgggcttgcgggtcagcgccttcgtcgccagtgaaacggtgcgcggtgcgccgatcaccgaaggaacgccgctggatggcaacctgacactgaactacgccttcggtctttga

SEQ ID NO: 535095 - DNA, 405 bp, Stenotrophomonas maltophilia
atggagcgattcaagaacgacatcgagcgtttgatcagcgtgcgttttgatgatgtcgatgcattgaatgaacagcttcacacgcacctgggagcgccgactcgacagggtttgagggacgagcggattgcagagcgcggaatgttgggtgaccttgaggtccggaacatcaagctgagaagtgctgccgatgatcctgcgcatgcgaacctgatctttgaggtcgcgccaccgagcattgcactcgaggaagttagttgggagggctccatcgtaaatccacctcaccccgatgcgtctggctcccgcccttactggtctgcgcaagtgaacggtgcagaggtcgtgctcgggctcgcggccgacaacgtgacgctgacctacgtatcgatcaggcagcgctaa

SEQ ID NO: 535096 - DNA, 1137 bp, Stenotrophomonas maltophilia
atggagcgttctgaagaagctggactgccacagcagcaggaggggggacgcccaggagccgcacgtcgtcctgcatcaccattggccgacccgtcgtttacgccgattctggcgaaatccacaacacttcaagcgggtctcgcccaagcaggtcgtgacggtctggatgttgtctgggggcaagccggtggcggcacctatcttgttcctggtgtgaagatcgttattgacgagaatgcgatcgggcaaggccccagaatcacacgttctctttctcacgaagttgggcaccatctcttcaccgaaggcccggatcggacttccaagcaagcctatgtaaacagcttgttgcgaggagaagccgccgcgacgctgagcaatgtccaggtgcagcgcgaaattctcgcggctggtggaccggacattggcgtgtcaggcacgggtaatcggccacagcagtatggagccattgcggtggagctccaggctggacggatcaatcgaagccaagcgcttggacagatctctgaggtgttcaagacggaggccccgtctgttggtcctcatgcgaattacgagctctactacggcgcgttctatgaccagcacatagcgccctcgcaacggcggcgcaggccggagccagaacttgacgccgaacgcactgcggttgcggagagagttgccacttccatcaacgactctccgtcgctgcgtcgggtttcttcttcaatagctgaacttggtgatgcagatcgttctctctatatgcagataagggctggtgtggaacgcctggacgccgagcatgggaagccatgggacgagtcgagccagcggatgaccgtgagcctgttggtactggccaaggagcaggggctttcgcgggtcgaccatgttgtgctcaacaacccgacagaaagcttggctcgtggggagagggtcttcatagtggaaggggcaatggatgatcctgcccatcgccgaggagacatggatacgatggatgcgcttcgtgcacctgaggcggagtcgcttcatcgtgctgatgcgttgaatcaatcgcaagcacgaggccttgaacaacagccggtacagcctgttcatacgaaggacggtccatcgttcttgagataa

SEQ ID NO: 535097 - DNA, 213 bp, Stenotrophomonas maltophilia
atgacaaccactcctccgcaggcgtcaaagcacgcctgcttcaccagcaacgcctcgctgcgtcccggtcaccacgtcatcgtgctgcatgaaaccgagcggctcttcttcaacatcggactcagtgccatccaggggagtccgtcgggtacgtcgtcctgcttcgctccctggtccgggaacaccagaagcccgtccgacgtcggaacctga

SEQ ID NO: 535098 - DNA, 1113 bp, Stenotrophomonas maltophilia
atggcaatgaaaatcatcgaccttgataccgttcaagcgaacggcaagcgaggtgaaacgcaacgtccggcattcacaaagatcaacgcgaattttgcagaagtctatggcggactcggtcaggctgaatccacacttgcggggctcgccggcagaatggtcggacgtaacgcgttgatcaatggcgacttccgcttctggcagcgcggctcaagcaggacagtgacggctccgctcgcagtctacgttccagacaggtatcagatcgtgtgcaccggggcgggccaggtcaaggtaagccggcaggtatttgcaaccccgacattcggggtcaccagctacatgaactgcgatgtttcgggcgcaactgccgcaactgaagccttctgtacgcagccggtagagggtgtgcagacgctctcgggatcaacggtcacgctcagcatgcaggcatgggcggcgtcacccggaagaaaaatcggtgtgcgcttcatccagacctttggaaagggtggatcacccgatgtgacgatctatgccggtgcccaggagattggaacggcctcgtcgctacgccagttcacggctgacctgccaagcatccaggggaaagtggtcggacccgacagcaagctccatgtcatcgtggacttctgcactccggcggcttacagcgcacaacttgtcgggcaatcaggctcgttctccctgacctgcatgcagctggagcgtggggctgtaccaacagagtacgaagtgcgaccggacacgatcgaactgatgctctgccaacgctacttcgagaagagctatcccgtcgccgtcactccagggacggttacccgacaagggcgaagttgcgcagcgcagtccaccgcagcgaacgccctgaacttcttctaccagcagtaccgtgttcccaagcgcacgtcggcggcggtcacgctctactcatccgagtctggcatggcaggaaaaatctgtcagaacaacaacgccgatatcaacggtgtggtcgaagatgcctctcaatcggggttctcactctatggcaacaacaacagcggcgcctgggggatgtggtggcactggacatcggacgcggagatctga

SEQ ID NO: 535099 - DNA, 441 bp, Stenotrophomonas maltophilia
atgtatcaactgacaggagatccagacattgtcagatgcacggagtcatccaccttcataccgaaagggcaccggtcatggtccctctacaaagagtggctggcagccgggaacaccgcggcacccgctgagtcattgctcagcatgacttcaacggcgcgccatcagctattgcgctccctggcatgggactggatgacgccctatgcacttcgtctcggccacgacagcatcgagaactgctgcagctacatcaacagcacggtcctccgctatgcgaagaatgccacccacatgatcgcctggcgcgacgcagtcagtgtcgccctcgaggggcttgccgaggattggcccgctgacattgagacctgggagcaggttcgtgcagcgctcccgcaaccccacatgttcgatttgccgaaacaggagcacaccccatga

SEQ ID NO: 535100 - DNA, 606 bp, Stenotrophomonas maltophilia
atgactgaccgccttcgtacgattcgcctgtacggcaagctgggtgcccgctttgggcgccggttccggctggcggtgaacagcccggccgaggcggtgcatgcgctgtgcacgatgctgccgggcttccagcagtacctgatgggcgcaaaggccaagggcatggagtttgccgtgttcaacggccggcagaacctgtcgcgggatcagctgcacgacccgccggggcaggatgacatccgcatcgcgccggtgatggtggggagcaagcggggcggcgtgttgcagacgattgtaggcgtcgttctgatcgttgtcggtgtagtggtcaatgcctggaccggcggaaccgctggcacgcccttcatcaagttcggcataagcatggcggtcggtggtgtcgctcagatgctcgcgccgcagcccagaggcatgggcgccaaagactcacccgataacacgcccagctacagcatgaacggcaccgtcaacacacaggcgcagggcaaccccgtgccggtcgcctatggcggccatgacagcaagggcatgttcatcggctcggccgtgatcagcggcggcatcctggcggaggaccagttttga

SEQ ID NO: 535101 - DNA, 471 bp, Stenotrophomonas maltophilia
atgttctcttttgcgcgtcgctgcctcgccctgacctgcctggctgcccctgcctttgccgcggccccacccagtgcggacgtggcccgcacccagctggtggaggctgtcacctgccagcgccatctgacacccgaacagttcgatgcgatggccaaggtactgatgcccgccggggccaaggccagggacgagcatgacaatggctacaccctggccgcgccactgatggtgcttggcctgccggtgacccatgtgaacgcctacgacggttccagtggcgaggatggcgtggacagttacacggcgtacttcggcaatacggagatcagcagggtcgccgcgctggcgaagatgccgccaccggtggcaggcagctaccgccgccaggtgggccggcatgatctggtcgtggatcgcctcgacggccagaccatcctgtactgccagttcgacctgcgcagccactga

SEQ ID NO: 535102 - DNA, 2373 bp, Stenotrophomonas maltophilia
gtgaggcgccaggcgccgctgcgcccgcgcttcctgtccacgggactgctggtactgctgcttctacccgccgcatcggcggaagatatccggtcgtcgcgctggctgcctggcagcagcgtacgggtggccacggccccctccctgcgccccgttcccccggcattggccgatacatcgtcaccgcctacgcttgcccatggctacgccgaccttgtggcccagcacgcccaactcgccttcctggaccacccctatccgaccactgccgcatcgatcctcgcggtgtgccgtcacgaggccgacctggtcatggtgtttggcggcgcaaggcaccaggccctcccctgccccgaccttgccgcgtccagccgcttccggggtggcgctaccctgctggccggacgcgccggcgagtggttgccacgggagatgcgcgagctcgacggacgggtcgtcgccgtcgttgaaggcgggccctacgccggctggctgcgcgcgcatcatccgcaggtccggctgcagcacctgcctgatcggcacgcggcattgacggcagtcgaatccggccgggcggacgtggcgattggcatcgagccgacattgcgacccctggttcgacgccatttcaatggcagcctgcgcctgcaatcgttcgacagcagcttctccaccgacctctacctgctcgtccgccaggacgaccggcagttgctcggacgcatcgaacaggcattgcgcgatatcacgctggaggagcatgcaggcctgctccacctatgggcgggccagaccctgcctgcggcagccgggaacgcacttgactggatgcaggtctcgcccccgcgcgggtggctgcttctggcccctctactgatcgccctaccgttgctgtggcgcgcgatccgccacctgcgcgtacgcggcgaccgaagcagcgcgcatgccatcggggtgatcagtcacgagatgcgcaattcggcgcaggccgtactgacctcgatcgagctgcttggacaatcgacattgccgaaaggcgagcgcgatctactcgccgctgccagcagcgccagccaatccctgcgcagcctgttgaatcgcgcactggatttttcgcgcctcgccagtggcgccttcaggccgcacgcccaagcctgtgatgcggcccagctttgccagcaggcactggacgccgtccgcccacacgcgcaacggaaaggcctgcagctgcttctcgataccccggccggaccttcgccgatcatcctggtggacagcgatgcgctacgccagattgccagcaacctgctggccaacgcggtgaagttcagtgatatcggcggcatcgaactgcgcctgcagttgctgcccacagcgcgaccgcgggaactgctgctggaggtgatcgacagcgggatcggcatcgcgccagcgcaggtggctgcactgtttcagccttttcagcagggcgacggcgggcagcagcgtggcggcagtggtctcgggctctccatcgcacgcgagctggcccgcgcaatgggaggtgatctgaccgtacacagcgttctcggacgcggcagccgcttcatcctgcgcctgccagtgtgcccagccggcaccagcgagcacgccaaggacatgcctgtaggcagcacgccactggccggactgcaactgctcctggtggaggaccacgcgctcaatcgccacgtcatcgccgagcagttgcgacgctggggtgcagaagtgtgcgccctggaggatgcggccagcgccctggccgaacagatccggaagcctcgccacgccgcgctgatcgacattgggttgcgtggcactgatggtcacgcgctggcgcgcgaactacgcgcccgttccgggcacccggtccgcctgatcgcgctgtctgcccgcaccggacgacgtcaccacgcacgctgccggcgctccggcttcgacgcggtgctgaccaagcccctgcgcgccgcacagctgctgcctgcgctcggcattccggcgccggagagcccgggcgaatccctgcagacgaatgaaatggatgcggcctacatcgccgacatctgcgatgagctcggcacaatcaggcgagctgtcgatcatgcagacgcatcggcactcggccatcacgcgcaccggttgcagggcacgctacagatgctgggccaatgcgagcatgcggccatcgccgcggaactggtcgatctggcgcacgacaccgcgccggactggatcgatgcgcgtcgcctgctggacgtgctgcaggccggacagagcccccgcgcagcgggagccctgcccgaccccttgatcacgcggccagacgctcgacctgacgacgggtcagatcgttga

SEQ ID NO: 535103 - DNA, 696 bp, Stenotrophomonas maltophilia
atggctgagattacacatcaatgttttagatgcaaaaccccgcatacgacctttgatgtcggaggaatgaattggctgactcagagatccggatggcaggacgtgcacgaagtatttggtgtttgccgttcctgtaaaaagggctccatactggtcgttcagacggacagccgcgactcatacgcgcaactgagattgatcggaggtctgcgtcaagtgccgggcgtgctgaatcatttcgtagacgttatcgccgtggtcaacatcaaggatgttgcgtcaatagcgccgccggatcatcttccggcaccgatcgaagcggcattctcggagggggcgtcctgcctctccattggctgcgtaaatgccgctgccgcaatgttccgcctatgcgttgatcttgcaacggttgatctcgttcctgcggaaggccagggcggccccaaccctcgaacagcaagggagcttggattgaggcttccgtggttgtttgaaaatgggaagcttccggaggatcttcacgatctttcggtctgcatcaaagatgatggcaacgatggcgtccacagggggtcgctatcctccgcagaagcagaagatctacttgacttcaccaccgagcttctccggcgtcgctatacggagaaggagcggattcgccttgcacgtgagcggaaggaggcgcggcctagatag

SEQ ID NO: 535104 - DNA, 714 bp, Stenotrophomonas maltophilia
atgcatgcgcgagaagagatgctcatgcatcgactcttgctcgatgtcaaaacggaagcggcgcggcgcacctactatttgaacagctacttcgacaacgtggaccacgatggttttgacgtcatctttgacgatcaggactacatcaagaagatccaagtgaagacggtccagaaaaaggggacgacgaacggatgggaggttcacaaacgactcctgcgcccgtcgtggggcctgatagagaagctgggttttgagccctccccttttggcgagggctcagatggcggggttgtactcatcgagttctgggacgatggccaagagctgaaggccgactactactacactgataccttcgtcctgacgctcttctactgcgacttcattaagcgctcacatgggcgatcgcagaaatctgtaaaggaattctgtcgcatttggcgagagggctcgggcagggagtcggctacggtacccaagtccgcctttcttaaggctaagagcgcttcggagcttctgtcgctaatgggccttcacagtacgagcggtggtggctggaagcaccagctgattgtcttggctagcaacatcttccgagtcgaacccatgacgatggctgcgccgccacagcagctgcttaattttatttggtccgaagtctctgcgctttgcgatgtctcgggtctccaatgcggcggggtcgatatctag

SEQ ID NO: 535105 - DNA, 1032 bp, Stenotrophomonas maltophilia
atgggtaacataattattcacctcaggcactgctacattgccaattcagatgatgtctggaatgtttcctactgtgggatctattacgaattaaaattcaaacatggcgaattcgacgagggcaaagtaatcgccatatcatttggaaggtgccatgctgatcatggcgccttccttgcttggttgtcagttttctttggtgaagactgcacggatccattccagcgagaagacactaggcattcatttaacagggggggcttcagcgccagtcagcagcagcttcaggagttcttggatgccgcctttgagaaagaaaataattaccaatcagcctgggaaaaggcgctgtttgagcaggccatgaattactacctggtcgggctgaggaatggaattttcatgatgccgcttactattggtttttttggtctttcaatggagtgtattggaaatttggtgtcagatcaaaatagcaagtatttcacccttggcacttttaggttcaataaattagttaatgatcgctttgagttgttcaaaaaggacaaggagcatggcagcgcttttaaagcctggcagaaggaaattgaggctgattcaaaattggtgcatgccatccggaatgcggtgtatggccattcacttttacacattgagaaagagcgccaggtcatagttgcgcacctgcacaaatggctaaaaagagctggcgcttctgatgacgatgcagcgctctggtttaaagtagagcggctcgaaatggaccttcaaattcacgctgacgggctatacaagatcggagcgagaagctccaggatccttatttttctgtatctcggaattgtcgcttacatcccattcgctgagcatgactaccgcccatttggctatgcgcccaagaaccgaacagtgaagtttgacggcatatcgatatccatatcggcgaaagaattctcaactatcgacgggtcggacaagaatggcgtgcggaccgattctattaatctgagcagctcaaacaagtcctag

SEQ ID NO: 535106 - DNA, 801 bp, Stenotrophomonas maltophilia
gtgattaatgaattaaaggagagcctactggccgcctacttgcagtgctacaaccaccttgataaatacagagatgtagaaatctactgcatctcggagatgaagaaggacaatcgcgagggcgcgccacgctacacggctgatcgagatcaagtgcccggaaacctggcaacctgcgtgattatcaacggatcaacgctggaagtaattagcaatacattaatctcgccaagcttcgctatcggcgctgaagtgagggagtatcaacgcgagcaatgctcgcagggggcaccgcttgactgccgtattgccacgaaggtgcatggaggagggtggagcgatgaggatgacatcttcgacacggggaagatctacgtgtcactcggcgaaaatttgaatgagtgcaacgtcatcaccgagaccattgcatgcgaaaggttggataggtcatccgattcagaacacatactcatcaaccttgttgatgcaatgcttgaagccaacttcctcccgcaagacctgatggtcgttattgcgacggagcgcatcccttgcgagagctgcactcgcactatgcttaaattcctagaaagaaatgcagccgcgaagctgtacgtcgggtacacatacgacacaaacccatctaagggctgtctagccagaagtgacaaggagttcatcaagcaggctcgggagagcaattcctccgatcgtatacagctcgacagagtgctagtggagaacaagagtcttcagtgcttctccacccgactccagatcaagcacggccccggggcgtag

SEQ ID NO: 535107 - DNA, 369 bp, Stenotrophomonas maltophilia
atgaatggcttaattcgaaagtgctgtggcctggccgtggcggtcggactcggagtggcgctgttcccgcctgttgcgctggggtcagaagcaactcagacctcagggtcgattgtgatttctgccttttccagggcctatcaggactttggccgcaggctgaaggcacaagcacatggcactcatgggctggatcggcacttggcggatattgctaactaccaggcaatcgtctacctggagggctcaagagtggttgtgcagctcatgccgcttccctatggggactccagtgttcgcggaggcggcgggaagtacgtcgtcgagggcggtcccgatggcgaaatgactttcgagccttaccgctag

SEQ ID NO: 535108 - DNA, 3102 bp, Stenotrophomonas maltophilia
atgaagagcattccccgtcggtcggccgatcaccgattcaccccgctcggtgccgccgtctgcctcgcgttgagcgccacgctggcgccaagcctcgcctcggcatacaccttccacgtaaatggcgatcggatcatcgcaaccggcggcgtcaactaccaggaccatatccgcctgcggaacatgctggacgcggccgcccgcaacggtcgggtcatcaaccaggtcgttttccgcgacagccccggcggggatgcggcagcagggcggggcaccggcgagttgctgcgccaacgaggcatcacctcggtgttccagggcaagtgcatctctgcctgcggcaccagcttcatcggtggcgtcgagcgtcgtatcgccacctacgacctgcccgagctcgatacgcggtttcccgacaacatcttcatgattcatggcagcactgcaggcggcaaggtggtgcccattgcacagcaggtatcagacgatcactacgccaaaatgatgcagggggttgccccgccggaagccattgcgcgggtggtcggcgccatcaacggaatgatcgttcccagcggctccttcctctactactatgaccccagtaccggcaggccagcacagttctgcccgaccgaggccacctgcaaggtgtaccccggcgtggatatcctcagtgatcgcatcatcacccgcgcagagcgcgtcgatctgtcggccgactaccttcgcgtgtcaggcaatgtgcgtggcgacctgaatcccaacttccacgctgcccagtacgaatatgccgtgggctatggcgcttccacgttcgatgccgaaaaggcagtggccggcgatacgtttggcatgatccgcctcgacaagggggctgtgtggaccgcagacacatccagcggcgccgagattctctgggcacaggccggcaaagtggatgtaacctccggcgcccggctggtcacactgaataccatcatcgacgccaccggaggcgtcaacctggaaggcggtcgactgaaggccgtcaataccacggtgtccggttcgctgcgcatcggcaacggcagcgaactggaaaacgtcagcaccctgcttgtaaagcgtggtggtagcgccaccctcagtggcggcaacatcaagaccgccgtcgtgacgctcgacccgggagcactgctggaaggacatggcagaatcacggccaccgagtacgtcaaggatgagtcctctcccaacgagccgtggaacgtgccacaggtagcacgggtgcgcgtggcaggcggcgacctgcatccgcagggtggtcgactgaccgtcaacggctacgtcagtttcgcgtattccaacgcaggtcggttgctgttcgatatcaccccagagacacgccaggcaggcctgttcctggatacgttcgaggtccatcgctgcgccagcgtgagcacttacttccagtgcgatcgcggacccgctgcaaaagcaccgggcttcctgatcggcggcgacgtgggcaagctcgccctgaatgtagcgccaggctactaccagcagaatctggccattccgctggtggaggggcggatctatgccagcaaagagggcgccttgttgacgggcaagctgctgaaagaccgcagcagtgagttcgacgccagtgttccgcaactgcaggctggccaggtcgccttcaccaaggccgagcgtcaggatggctcgggctacagcgtcgatctgaccagtgcagaggcagggaagcgcatgttccacccacgcgacaattcgctgctcagcttcagcatccgccagacgggcgacggcatctgggcgatcgccaaccctgccttcgacgatgtctccctgtttgccaacgcggcgtcgggcggcggcctgggcgaggcattgaagaacgcagcatcacggccggcgtcggcgctgcatccattgctgggaatcctgcagtttgccgaccgcgacgtcattgcccagcaggcgggtgcattgcggggtgatgcgcacgcaagcctgcgtctggccgacaatgcgctggtgggcagcatcggcagcgtcgtacaacagcaccaggccgcccgacgcaatggcagcggcgatgccgcaggcctggccgcacaagcggcgcaggcggcttcggcacagccgggcatggccaacggcaccctgttcaatcagctggccatgcatctggtggagcccgctggcctcggcaacagcagtgcagaggccagcgcaccggccggccgccacgggctatggggccgcggcttcggcagtcatggccgcatcgatggacagggcggcgtggccgggcttagccacaccgtgggcggcatcgtgctgggtgccgacacacaggttgccgatgaccgcgtcaccttgggcgtcagcgtcgccgccgccgacatgtccaccaaggggcgtggtggctccggcttcaccggcgatgtgcgtgcgctggacgtgggcggctatctggatgccacatactcgcgcggctacctgtcggcctccgttcgctataccgacctgcgccacgatacccgtcgcagcattgccggcatcgaagggctggagaccccgctgcaggccaagtacaacaacgatgcgatttcagcgcgcctggaacacggcttctcgttcaccacaggcaagggcctggtgatccagccgctgctgccagtgcttgactatgctcgcacctcggccatccgcttcaacgaagggcagggggctgcggcactggtcgggcgtggcggcagtctggagagtattcgcgcaggtgccggcctgcagctgttcaaaaccttcgaaggcaaccacggcgagcgcatcaccccgcgtgcgcgcgttgtctggcagaaggagctgggcgatacccaggcacgttacagcaccggattttccgccgcaccggatcttgtgttcggcaccaacagccagacggtgggtgagcaggtgctggcgtggaatctgggcgtaaccagccgcgccagcgaccgcctgtcggtcatggtggactacatcggcgaacgccgcgatgggcagtcccagaacggcgtgcagctggggctgggttacagcttctga

SEQ ID NO: 535109 - DNA, 579 bp, Stenotrophomonas maltophilia
atgagatccattgatctgtggacaatgaaacggagcgccaggaaggctggcttgcgggcgattgggaactttctgattgcttcgtacacgcctgacgtgatctccgggtttgccatcgatccagcgccgtcctccatctatgtatggaccttcgcacttccggcctatgacgacctgccattcctgcatatgtctctcggccagagggtcgcttgcccggaagatccaaaggattttttccgcggcacgcacgaggcccacctcgcaatgctcgaaggggtgagaacagctgcggacctcctgatgtatgttgaagaggccggcttcgggggcgattactgccaatgggtgaagtacctgtccgtcattcgcctgggcgatttccaggcagcagacgctgcgctgaaggatctgcttgcactgccgatgtccagtgcgattcgtggaagactggacaggatgctggaggcaatcgggagaggcggcgaatcaggtgcgcagcggcttctggaagaatggtccatgcggacggcccgattgatgggtggtcgtagcgctattggggatcgcctgcagtaa

SEQ ID NO: 535110 - DNA, 2190 bp, Stenotrophomonas maltophilia
atgcgccgaataatgcgaaggatgccgctacctccaaccctgagggaaagctacgcgctctcatggtacgaggagatccggcgccactatgacttgccgccggaggagcgtgttcgccgaagggcacccaaggcggctcatgtcctggagagccccgagctgaccacccaattgctgggtatgcagcgagggaagtgtgcctactgcgaagttcgcctttcccactccctgacgatcgaacactatcgccccctgtcaaacgcatccggtggagattcggacggccaggacagccctgatcactacgcatggtttgcactggaatggcgcaacctgatgctgacttgccctgagtgcagcatggcgaaagccaattctttcccggtgactcgacggcgcgcccctcccctttccacatggaatcaggcgcagcgcgagaagccgctgctgatcaatccgtacaccatcgaggtggaacgtcatattgatttcgatcgccgcggagcggctgtcccagtcagccctcgtggagaggccaccatcgatatcctcggcttgaaccggagccagctggtagagtcgcgggcttgggtgatccaacgcgtggcaaagatgctgcgggcacctgaatccgacccggccggactgctcgagcttgttcatcccgaggcggaacactgtggcgcagcagcaatttatctgcgcacccaactgctgaggacaaggtttcatctcgatcgcagccgcgacattgttcatcagatcaggaagcacctcaggtctggcgaactcattcgcgcgctttccaaagctcgcgaccgaggagaggatctttcattccgggcacgttcggaatctcccctggtcgagtctgcgaaagccgatgcgaagttgcaggcgatcaggggaatcagcatccgttccttcatgagcatagatcaactatcactggatcttcccccgcgcgggcagtcgaacaaggcggcatgcctgatggttctcggcgagaacggggcgggcaagagctcgatcctcaaggcgattgctctctcgcttgctggcaaggaagggcgggatgcgctggagctgaaccgggatgcgtttgcctctcgccacgcctcgaactgggaatcgatcagtacggacccaacgcaggtgaaactgtcgttcggcaacgggattgcttcgaaatttcactgggatgccaccggctaccggcaggaacacgcaggcgcggcacttcctccagtgctcgcgtatggcgcccatcgacttgcaggcaagggctcgacgcaacttggcccggtcgcttcattgttcaatccggaaattgtgctgccttcgcccgttgagtggcttgcgtcgctcgatgatcatcttttcgatgcggccgctcgagcgctccgcgtcgtcctggccctcaaacgggatgacagaatctatcgtgacgacaaaggaaccgttcttgcgcgggtccaggggcgcgtctcgcccatcgagcaattgagcgacggttaccgctccttgttctcgatggtcgtcgacatgatgaagggactgctcaagggtcgtggagatctggagtacgcccgtggtgtcgtgctgatcgatgagatagaaggacatcttcatcccagatggaagatgcgggtcgtgcgtgcattgcgcgacgcatttcctggcgttcagttcattcttacaacgcatgatccactgtgcctgagaggcatggagaagggggaagtggtggtgatctatcgcgatggctcaggcgagatgagagcgcgcgatgacctaccggacgtatcctcgcttcgggtagaccagttgctgacgtctgaactcttcgggctcaacagtgctacagatccgtccatggacagggttgtccacgaattggcggctattgtcgggatgcctcaggagctgcagacccctgctctgcgcgagcgtcgtgacgcactgctttgccagttccctggcatcgacaccattggcaacgacgtggggcgccagatcgtcgcagaggcgatcaccaggcacctgcgggaagatggcgtagccgatatcacgctgcgggcagacgcccgccgtgattctgtcagcaggatcatcgaggtcctgcgtgccgaggagtcgcgcctcgaaagtgggtcttcgcataccgacccggaaggagtgggcgtgtga

SEQ ID NO: 535111 - DNA, 921 bp, Stenotrophomonas maltophilia
gtgatattcagggatcgatcaacggtggcggcgcccaagtccctcaccgcccccagcggtgcgggaaaatctgagctgaagaaggcgcgcaaacactacggcgcccagaaggatggagcccagaaagattcctatccgttttcgagctacaaggggaaagatgtagtcgagcagctggagctgctcttcggcaagaagtgcgcctactgcgaaacgaagtacgcggcaggtagcccgctacatgtcgagcaccatcgcccgaaagcgggcgtcactggtgacgcatcccatcgtggttactggtggctcgcgagtgattggaccaatctcctgccctcgtgcacggactgcaattgcgagcgctggcaacgcacggttgaggacgcacctgagttcgcggacgaactgcgccccgatgcattcctctatggcaagggaaaccggtttccgttgatcgggccttatcgcgcaaaagggccccgtagcaagtatcagaatgaagacgcgctgctgattgatcccacgcggcgtgacccggaactgcatatcggatgggcaataatcaaggacaggagcttcgccactccgttgtgggataagacacgcggagtcgctgacccctatggattgttcagcgttcgaatctacggcttgaacaggcctgacttgatcgacgcccgtaccgagattcttggcgacatcaggttgcgtgtgaatcgactgcgcaagcgcatcgcgcaagcaacgtccatgacgacggaagatcttgaagaggccactgccgacctcatcggcgagatcagggaagtggcagccctggccgggaaggacagagcctactcggcagccatttcttctgagttccgcagctttttcgacagttcaatagctcagctggaagctgtgcgttcaaagctgtga

SEQ ID NO: 535112 - DNA, 957 bp, Stenotrophomonas maltophilia
atgccccaggtctatgccgcgctctggaacggaacccattacctgatcacccgaaagcggatcatcaacaactggtgggcctccaattcggtgatggtgctgactgcagaagcactggaagccaccctggccaccgcagaatcacccgaattgccgccagccaaggactggcaaccggcactcattctgctgcgcagtgcccagcttgccgctgcatccgccggctacgcggatacgcccgatggccagggtatccaggtcaatttcagcaacgccgtccaggcaatgcaggcgacgccgccgaatccggaccaggttggatccgctgtcacccacctcacccggagattgttccgtcaatcgacgctgccagagcgcatcaggaacctggcaaacaccttgccggtgttttcgccggattcatggggggccgcgctgctgacggcacagaacctggcgcgcgacacgcgggcatgggcagccgaggtccccatggttgtcgtcaaccaggctgggcaatggacactccctggcggtcgcaggcatgacaacgagaccgaagaagatgctgcccgccgggagttcatggaggaaaccggcgtcctcctcgactccggcaatttcccgcgggatctgatggcttcgaatcgatcctacgcattggtccgcttccggaccgcaacccaggatctgcaggccatcgccgatgcggtctgcaccaacgtgcgggcccggactggagcggcgcgcccagccgccagctgggtgaccgattgggagatcgaccatgcacagatcgtgtcgatcacggagcttggcaactacctgggtacacgtgcagtgatcacgccgccaagtacccaggatttcgccaccatgctgcagcagatgtccaggccctacagccagtcgatcgactggtatgcctcgatggccagagccctgtcttccagctga

SEQ ID NO: 535113 - DNA, 567 bp, Stenotrophomonas maltophilia
gtgacccgcccctatcccgagctgcccccgattgatgtgcgccgcgcctacctggcctggtgtgcgccctcgccctggtggctggcgctggtgatggcatcgaccaccgcctggctgctggccagccagcatccgatgcccccactgctgacgggcctcggcgccgccgcgctgggctggttccgcagcgatggccccggccatgccacccgcgcgggaacagcggcctcgctgctgctcatcgggctggcgatggtgtccgcctcggcctccggctcccatgccacgctgccgctgctgctcgcggtgacagcgctactgctggttgccctgctggcgctgcggctgcgcgccatcatcgccatggcggcgcgcctgcaggcacgggtggatgccaccccgatggcgtgccgatggacccacctgccggcagcgctctccacgctgatggtgcagcggctgcgcagcgtggatccggtggagccgtccctgcatcgcacgctggtgctggccacactggcctgggcagccaacgaggaagcacaggccatggaacgccgacgatga

SEQ ID NO: 535114 - DNA, 447 bp, Stenotrophomonas maltophilia
atgcctaccacggcaccgcccgcagcggacaggaacaccttcattgccaacctcaaccgcatcggctccggtgcggcggccgatggccaaccttgcccggagcggtatcaactgcccagccgctgcctggccctggccgatgcggattgcgcgttgagcgggttgcgggttgtgctggaaatgctgctggcggcggaacgcacccgccagaacgccgaccccgaagagtacgcgggcaaccgggtgatggaggggctggtcatggcttgcccgtcgttgtgcgcgcaggcagtgggcggttccagcccgaagggtgaaggccatgcgcaacggctttcagcgaaaaccgctttcagcaggcgtcaatgctcgctgaaagcgcccctcagatcgacgccgatgatcggcgagaagtccaccttgcacagttccagctcgaagagctga

SEQ ID NO: 535115 - DNA, 819 bp, Stenotrophomonas maltophilia
atgaaacgcaaccgagtgaagctgtgggcgctggcggcactgttcctggccacgggcagcgtatcggcgcgggagatcacggttgatcgcggcgcctacgcgctccaggcacaggagtcaggtagcggcgcggtcaccgtggtctttgaatcagggttcggccagggtgccggcgtctggaaggatgtgatcaccgggctgggagaggactaccacagcatcgcgtacgcgcgcgccggcctcggaaagtccggcagcaatggccagcccaagcgcatcgacgaacacctggcggatcttactgccgtcatcgatacgctcgcgccggggcgcaaggtcgtgctggtcggccactcctatggtggactgctcgccaccgagttcgcgcggcgtcatcccgatcgcctgcagggcctggtactggtcgatccggccacgatggggcagcggcacgccttcaggcaggccgatgccgcacgcatccaggcagacgacacctcgctgcgcgccatgctgtcacctgcgatggtcgccgactacgccatcctcatcgagcagcttgatgcgccgggtgcgcagacacctcagacgatgccggatgtaccggtcgcgctgctcaccgccacgcagatcgccagcgaaccgctcttcttcgaagaaaccgcacagggcaaggctctctggaagatccagcacgccctgctcttctccggattcacccgaggctcgcatcgctatctggacaccggccacaacctccatcgcgagaatccggcggcggtcgtctcggccatccaatcggtctcggctcgcccttag

SEQ ID NO: 535116 - DNA, 447 bp, Stenotrophomonas maltophilia
atgactagccccgccggaatggccaggcgcgccatcgtcgtgacagtctgtagcgcgctgtgcgcctgcggcctggtgatggacagttcgttcgacaccatgcaggaggcaatcgactccgacagagtgaacaagggatggattcccggctgggcgccccacgaggcgactgacctgcgcgaggtgcacgacctcgactcaaacaccagcgcgctggccttcaccaagccccctgcgataccactgcagctgcctgcggattgccaggcaaccacattcaacgacagcgatcctgttgcgttcgatcgatactggtggcctggcaacgcgacgctaagcgcgtcgtaccgcgtctttcactgcgcgcccgaatccggaaaatcggttttcgtggcggtgagcagaaacgaagaccgcgtacttttctggcggacatacgcgcgctga

SEQ ID NO: 535117 - DNA, 1878 bp, Stenotrophomonas maltophilia
atgatgaaaaggatgttgctctgctgtgtgatgctggcgacggggccggcgatggccgacacaggtgccttcgccgttcgggcggacgggttccagggggaggcgttggtcagtgccgatggccgcctgcgggtagcccccgatggtgcgagcctcgtcccgctggcgccgggtcgctggtaccgcagtgattggtacagccgggcgggcaccgatcaggtgccgcgttcgcagtggttcgatgatcagggccgcctgcttcatgagtttgccggccgtatccactatgacgatcgcctgcaaggcagtgagaggctctggcgtgtcgagatgcgcgatgcacaggagcgctacctcggtaccggcctggccgatgcgcagggcagggtgcacttcgcaccgacccttgagtccggtgagtggcgcctgctgtctccggatcgggtcgtctggcagggccgcgatggtggcactcgattcttcagcctggacggtcgcgaggtactgcggatcgacgggccggagatctgggtgggaggaccgttcaccgaacggcaggtctatgtgatctgtgccgatcatgggacggagccctgccgcatacaggatgaaacgggcaccgtattgctgagcggcgacttcgacgaagcgcggcctgcgggtgacaatggctggtggctgcgtcgcctggatacctggatgcgggttgatgcagcgggcgcacgcgtcgaccctgcgctgtatcaaggtcctgcactgtggcctcactatcgtctcagcgttcgacccgacgatgaccgcactgttcccctgggggcaaggcggtatgccagaggcctcgacagcgatacgccggaacggggctggttgctggagggtgggcgttttgtcgcgctgcccatacgaaccaacagtgtgatcgtggactactgcccggggcgctggctgctgcgcggcgaagacggcgatgaggtgatcgtggacgcgcaggcccgtgtggtcggcaaggcgcggtcgttgagtttcaataggcatcaagcattgccctggcgactccgcaatgccgatggaggcgctggcgccgccattctcgactgcgatggcagggtgctgttcgaacaggccggtgtgaccgactatcgtgcggcggcgagcggcgtgatgggaacgctggcaggcgagcagggcccacggctatggctgggtgcggacctgaagccgcatctgatgccacaggggctgcggctgcatgaagaccgcatcgcgccgccactgctggtgctggaggatgcagaaggacactctcacctctacaacatcacgctcggcaaggtggtggcgccagcgtttggatcggtcgaggcgctagcgaccgatcacatgatcttcctgcgtgacgggcgctacggaatgatgctggccgatgggcgcgaggtactgccgccagaccatgcggagatcctgccgttgtcgaacgatcgcgtctggacgcggcagtatgtcggccatgatgaggcgtggcagacccggatcacgctgtacgacggcgaccagaacgtgctggcgcagcgtacgtccgagtcgggcggcgtaaaaccggtcccggtgcaggacggcggtgaccgcgttccaggcatggtcgaggtcagcttcgagtacaccgacgccgagcgccatgcctaccgactgcggcagtggctggatcgggatggcgtggtacgggccagcgcggtgcactgcactccgcaggaaggtgccgcaggcgaagggcagggcgtgctgctggggcaggggtggcgcgtggacagtaatccgaaacagccctgccagctgcctgcaggggtgatgcaggcgctgcagggcaggggcctgcattag

SEQ ID NO: 535118 - DNA, 1089 bp, Stenotrophomonas maltophilia
atgttcgttcgtttgggcagcctcatcatcctcggcctgtgcagcaccggcgcgctggccgccgatgccacctatcggcccgcctttcaccccgaccagctgaagggacctcccgcgggccgcccgaacgaagtgctggtgctcggtacgccccatctttccgggctgccgaagaccttcactccggagctgttggagcccctgctgaagcgcctgcaggcctggcagccgaccgccatcgccgtcgaaaacctgtccggcctgcagtgcgatttcatgcgtcgcaaccccgcccgctatgccgacagtgtcgagacctactgcatcgatccggcaccggcacaggctgcaaccggcctggacgtccccagcgccaatgccgagatggagcgcctgctcgcgcagtggccgacgtcgcccacgcccgcgcagcgccgccgcctggccgctgtgttcctggccgccggcgagaacggctcggccgtggtgcaatggctgcgcctgcccaaggacgaacgtcgcgccgccgacagcctgacacccgagctggtgcagttcctcgacaggcgcatggccaggcctgacgaggtgggcatgatcgccggagtactcgccgcgcgcctggggctggagcgcctgtggtcggtcgatgaccacacgggcgacgcccccattctgaaagctcaggaaaaggcctacggtgcggccctgaaagcagcctgggacaacccggcaagtgcggcacggttcgccgcggacgaatcgctggaggccaacctgggcaagcccgatggcctgcttgcgctctatcgcaactacaacgccccggaaacggcgatgactgtctacgacagcgacttcggcgccgccctggtcgagccgtccaccgaagagttcggccgcaactatgtcggctactgggaaacccgcaacctgcgcatggtcgccaacatgcgcgacgtgctgggccagcaccccggcagccgcatgctggcgatcgtcggtgcctcgcacaagggctactacgaggcctacctcaaccagatgcacgatgtgcagctggtcagtgcggacgcagtattgcgttga

SEQ ID NO: 535119 - DNA, 324 bp, Stenotrophomonas maltophilia
atggtggccaatatcgcccactcttggagcgcgatcgccgctggcagtgtgccgaagggctccgcgatccatttggggttgaacgagcgtgatgcacgtgacaccgcggtcagtcagtgcggagcaggtgactgcaaagtggtggctgctgtcacgcttggccagtgcgccgcagtggtccgtgcccgcagtagtggcagtgacgttgagcagacctattctgcagtggccgggacactgcccgaggcggaggaaaaggcagtgggggaatgtatcgatgccgatgcgaaagcctgttctctgctactcaacaactgcacgtga

SEQ ID NO: 535120 - DNA, 144 bp, Stenotrophomonas maltophilia
atgaggatggtgtccaaggttgcgttcgccttttgggggagcacgttgacgggtacgctgatgggtgagaatttctgcgaaggtatgtcgggcatggcactgcagcaaggcggcatgggcttgatcctgatcacgctgatctga

SEQ ID NO: 535121 - DNA, 276 bp, Stenotrophomonas maltophilia
atgcgcaagcgctgcaacgacagagttcacagaagggatgggtcagatcccttctccttgaaaagggatctgaccccggggtgggacctcttggcagagcgcgcacaaacaaaaaccgccgccccgaagggcggcggtccagtgcacgcatgcagcgtgggtcaggcggcctgcggcatccgcagcgagcgcaccagcccgccgatatcgacgatcaacgcgacgcggccgtcgccgaggatggtggcaccggacaccccgccgatgcggcggtag

SEQ ID NO: 535122 - DNA, 2379 bp, Stenotrophomonas maltophilia
atgccgtggatcaacaacctgaaactgatgccgaagctgatgctgaccttcggcgtcatcctgctggtgatgctgctgcagggcatcgtcgcctatcgtggcctgcattcgctgaacaacgtcaccaccgaactggccggttcgcgcatggagagcatccgcatggccggcgagatgcgcggcatgctgggcgaataccgcaatgccgcctaccagcagttgatccgcgccagcgacgacgtcaagtccgatgcgcgcaagcaggccgtcgaactgcgcgagagcatggacaagtcgatcaagggctatccggcactggtcgacaacccgcagcagaagaagctgttcgacaccttcgccaaggaatggaaggacgccctggcttcctatgacagcgtcaccgagatgctggaactggacctgccggacgacgccatcgataccttcgtcggcgaaacccgcaccaagcaccgcaaggccgcctcggcgctggaagcgctgatcgccgaagacaaccgcctcgcccgcgcctcgcgcgaagaggccgaatccacctactccgcctcggccgtgctgaccgtgatcgccctgctgggcggcgccgcgctcggcctggtgctggtgtggctgtttgcccgcgccctggtcggcagcgtgcgtggcgccgtctcggtcgccaacgacgtggccggcggcaagctcgatggccacatcgacgtcagccgccaggacgaagtgggcgaactgatgcagtccatgcagcgcatgcagcgcgacctgcgcgagcgcatcgagaccgaccaggccatcgcccgcgagaacctgcgcatccgtaccgcgctggattacagctcgaccggcgtgtacctgaccgacaccagcaacaccatcgtctacagcaaccgcgccctgcagcagaccctgagccagtaccaggacgacgtgcgccgcgacctgccggacttcgatgcgcaggcctcgctgatcggcaagccggtcaccgtacttgaacaccgcggcgagatggaccagaccctgctgggcaacctgaaggcacacggcgtcgcccgtcgcccgatgcagtatggcgatgcccagttcgcccaggtggtctcgaccatccgcaatgaaggcggcgacaccgtcggctacgtggtggaatggcgcgaccgcacccaggaagcgcaggtcgaagccgaagtggcacgcgtgatcgcccaggccgccgctggtgacctgtccggccgcatcgacgccaccgacaaggaaggcttcttcctgcagctggcccagcagatcaacggcctgctggacgccaacgctggcagcatcgaacagatctccggactgcttgccgcgctgtcgcagggcgacctgaccgtgcgcatgcacggcgactaccagggcgtgttcgcccgcatgcgtgacgatgccaacgccaccgccgcgcagctgagcgagatcgtcacccgcatcaagcagtccagccgcgcgatcagctcggccgccggcgagatcgcctcgggcaacagcgacctgtcgcgccgcaccgagcagcaggccgccaacctggaagaaaccgctgcttcgatggaggaactgacctccaccgtgcgccagaacgccgagcacgcccgccaggccaaccagctcgccatcggcgcacacggcgtcgcctcgcagggcggcagcgtggtcggccaggtggtcaccaccatgtcggccatcgaagcctcgtcgaagaagatcgccgagatcatctcggtcatcgacggcatcgcgttccagaccaacatcctggcgctgaacgccgcagtggaagccgcgcgtgccggtgaacagggccgtggtttcgccgtggtcgccagcgaagtgcgtaccctcgcccagcgctcggccgctgccgccaaggagatcaagggcctgatcgacgactcggtcggcaaggtcaacgatggctcggcactggtgcacaaggccggcgcgaccatgggtgagatcgtcgcctcggtgcagcgcgtgaccgacatcatggccgagatttccgctgcctcgcaggaacagtcggctggcatcgagcaggtcaaccagaccgtggtgcagatggacgagaccacccagcagaatgccgcgctggtggaggaagccaccgccgccgcacgtgcaatggaagaacaggccggccatctcagcgaagcggtgtcgatcttcgtggtcgacgaagccgaggtcgtcaccgccccgcgcgtcgccgcagccccggccccgcgagccactgcgccggtcgccccggcaccggcggcaccgccggcccgccgcaccgctggcggtcgcccgatggccaccgaactggccgacggagactggcaggagttctga

SEQ ID NO: 535123 - DNA, 429 bp, Stenotrophomonas maltophilia
atgtcgcaggatcgattgagagggagccgcccccgctgctggcgctgcgttggcagtgcggtggtactggccacgctgatgatggcccacggcgccatggcgcagcaggagacgaagcaatcggttgtcgagaacgttcgccgtgcacacgtgcctgcgtcgatcgtgatggagaccaagcacaacaacccgccgcgctatccgtcgcaggcctttcgcgaggggaaacagggcgaaacgatcctgatggtgaaggtggctgccaatggacagtggctcgacgcgatcgttctggagagcagcggctggccggagctggacgaggccgcgcaggcggcgactcgcaagtggcaatatctgccggcgagcgaagacggcgtgccggtgcccggagagatccgcgtgccggtgtcgttcaaattgtggtga

SEQ ID NO: 535124 - DNA, 1755 bp, Stenotrophomonas maltophilia
atgttcagttgcttgttcggtgctggaatccagtggattcatctcagaagtgatgcccctcgcctcttcggcttcccggagtttctctcgggattggcgttgctccttctggtctggaccatattcgacgtgaggtatcgattccgcgtcgcaaccgcgagaattcacgtcgagaagttcgcgatgattgcgatgatctcggtgggctgccttactctcctcaccgattggtggcgcgccacatcccggccggtcatcgccggatcattgctcactcccgagacctggcaggccgctcttgctgccgtgttcttcgccacattgatcgcctggacaatcgcggcgttctcatcatcgaatcgattcagtgccgccaacgcaaaccgcttttccgaggccgtccagaagatcatcgatcgcggaaggccagatgaaatttcagtactggtcgaggaactaggtcgctccatgggagagatcgctcgccacctgcatgcaccggaaacagcgcccagcaacgaaaaatccgtgcacgcatgcgcagagcgaatcgcccatcgattcaaggatcggaacttctgtcgcaccatcgtagttgagtgcccgaccgccattcctgcattcttcagggaaatcccatccactgatcggccacatcccgccgccatccgttttgcagagaatctggttgctgaagcaatcagactcgatggatcgttcctctacaacgaggactacttccccgcaaatgacatcgatgataaggcgccccctcacccggcatcttccgcactcgtctgcaaccgcgcgctactcgattactcctcagacctgctggctccacgcgaggggtctgcagtcagactgagcctcccccagtggcgcgcctatctcggcctggtatccctggcgcacgcagcatggatggataatccgtcgccgaaacctccccacgcactgcattgggcacgcttcttcattgaacgccagacctccgaccttgcacagatcagggagcccgtaacgttccggagcgagccctaccaacgtgtcgaaatggagctgcagttcattggcagattgatcgcccagcttccggagacaccgcttccatcgacaggacgaggggagccggcaatcagctatatcgaagccatggcgttctcattgatcgagtcagccgcagagatgaaggccccgcaggcttcggccacaaaaatccagttctcgctcatctgggaacacctgttctcgcaccccattcgtgcgtcggccgcaggaaggcagttccaggagcagatcgccggacgcatgctctcaagcatccgtgaatgccccagcctggacgctgtccacctgctcagcttctgcatcaacgctctgggcctttcggcaaccactgccgaatcaccttatggagagccctggcgtgcctttcacatggatctcctggcatggatgaagacccacctcgggcccttgctggaacgctacccacgcatgtccgagtacttcgttgaaggcatcgagtacgatgcgttgaatcacaccttgatccactggtatgtaaaggggggcgaacgccagccgcacccgcaaaccctgctgctgacgcatcgggaatcgatacgtcagccgtccgactccgatcagaagccaaggggcgcgtcaaacgccctcgcccggatactgcgcacagcggaatcagcggcacagcggattctcggactcacgcgacgaaccatcaaaccctag

SEQ ID NO: 535125 - DNA, 1044 bp, Stenotrophomonas maltophilia
atgtaccgcccgctgtgcgctctgattgtcggcctgctgctgccgctcacctcccatgccggaaacacgccggtcacacccggtatcgagttcgtgcaccacgactggttcctggcctgcgacaacaccggcacctgccgtgccgccggctatggcccggagagcgcagacagcccgctgagcctgatgctggaacgtgccggcggtcccggcacggcagtaaaggcgcgactgcgggtgggcgaggatggcgaaagcgcaatgccagaaggcgcgatgcgcctgctggtgaacggccgtgatctggggccggtgcgggacaccggcgccgacgaatccgtgacgctgcgaccggcacaggttggtgcgctgctcgccgccctgcccggccaggcccgcatcgaggtgatcgacagcagggccacgcgctggccgatttccgatcgtggtgccgccgccgtgctgttgaaggtggacgaagtacaagggcgccttggcacgcccggtgccctagtacggcgtggcacgcgcgctgaagcgagtgtgccggctgcgcagaccaggcccgtgatcatgcgtgccacgctggcggctactcgccccggagacagcaaactgggtagcagcgaagcgctgcgcgacgcgctgattgccacgctcgacgacggtgacgactgtccgcgtctgatcgagtacaagggcaccccggaaatggtgatcgagcggctggacgacagccatgtactggtgcaggcgctgtgccagatgggtgcatacaactacagcaatggcttctggatcgcgcgcgatcgccctccgttcgccccgcaggcggtcacgctcgaagcggagggtttctcgcacttcgagcgcacgctgtacgcacgctacaaaggccgcggcatcggcgactgcgtttccggctcggactggacatgggatggccgccgattccagccaagcagtgccttcagcaccgggctgtgccgtggcatgccgggcggtcactggatgctgccgaccctggtcagcgaggttcgttga

SEQ ID NO: 535126 - DNA, 1071 bp, Stenotrophomonas maltophilia
atgcgctcccctgctctgccgcaattgccgctgttcctgctgggattgctggcgatgtcttcgtccgcctgggccacggctccggttggcgcatcgttcgccgagggcgactggttcatggtgtgcgacaacacgcgtgcctgccgtatcgccggtgtcggcgcctccgcaccgctgagactggccgcgctgatcgagcgcaatggcggacccggggaagcggtggagatccggctggtactcgcccgcgacgacgctgacgaccccgaggcacaagcgcagtctcctgttggcgcactgcacctgcagctggacggagaacgcgtgggcagcatcggggcacttgagtcagccacggagcacgcaaagctcaccccggctcaagtgcaggcgttcaacaccgccctcatcaggcaatcccgcatcagcatcactgatggcagggggcagacatggtcgctgtctgcatccggcgcagccgcactgatgctgaagatggatcagatccagcaccgcctggatacgcccggtgcactggtgcaacgaggaagccgaccggagtcgaacgtgccgcctgctctgccgaagccggtgctggccatgccatccaagcgggcacctccgcgtgaggaggatgcgcgcctgggcgaacgcgagaacctgcgccggctgcttcggcccgacaacaaggcggactgggcgtgcgctgcggatgtaccacagaccagcgcaccctacatcgccatccagcgcctggacgaccatcacgtactggcctccgttgtctgccacatcccggggttcaatgtgccgggtgggacgtggtcgatcaacgaccaggcaccgttcaatcccgttttcattacccagggcgcactgttcccgtactcacgggagctgatgttcgttgaagagactgtggagaccgatcgggatcgctgcggaacggggcgctactgggcatgggatggccagcggatgcagctgagcatggagtacgttggtggcacctgcagtggcgctggagcttccacttggcgactgccgacctatatcactgaattccggtag

SEQ ID NO: 535127 - DNA, 495 bp, Stenotrophomonas maltophilia
atggcggccatccttccttttgcgcacgccatgactgagtgcctttaccccgtgcagcccgcacactacgccgccatcggcgcgtggctggattcggctggtgcaacacagcgctgggcaggtcccggcgtgcagtatccgctcgggtccgatgcattcgcgcaggcactgcagctgcagcagcgcccgggttgggtgctgctggatgcggagggtcactgcgttggtttcggccagtactggccgacgggccccggcacgctgcacctgggccgcatcatcgtttcgccgcaggcacgcgggcggggcctgggacgtgtactgatgcaggtgctgatggcacaggcgctgcactccgccgcggtggaacggctgaccctgcgtgtctatcgtgacaacgtcgcggcggtgagcctgtaccgtgacctgggcttccagccgctggaagatgcttcgacaccagagctgctgttcatgcagcaccatgccggttga

SEQ ID NO: 535128 - DNA, 660 bp, Stenotrophomonas maltophilia
atgaacaccttgatgtcctccccggttgcaccgctgctgcagcgcctgtttgaagaagccaacacagcgtgcagcccggcactgacggcggttcctgccgatgaacggcagcgcctgctggccagtcgtaatgggtatacccggctgtatcgtgaactgctgaaagacctttggctcccggtgtcgcctgagaccggccggttgctgtacctgctggcgcgcagcagccgcgcgcgcagcatcgtggagttcggcacctccttcggcatctccagcatccatctggccgctgccttgcgtgacaacggtggtggccggctgatcacaaccgaattcgaaccggacaaggcgcatcgagccgccgctcacctgcgcgaggctggcttggccgacctggtcgaactgcgggttggcgatgcactgcagaccctggcggcagacctgccggagtcgatcgatctggtgctgctggatggggccaaagtgctgtatccggaggtgctggatctgctgcaggcgcggcttcgaccgggtgcactggtgttggccgacaatgcagacgacagccctgtttacctgcaacgcgtgcgttccgatggcagcggctacctgacgctgccgtttaccgacgacgtcgagttgtccatgcgcctggattga

SEQ ID NO: 535129 - DNA, 675 bp, Stenotrophomonas maltophilia
atggccgaacgccgtccaccacagatttcctcgagaaaacagcctcgccaggttcgctccaacgacctcgtcgccgccatcctcgaagcggctgctcaggttctgaagcaggaaggcgcgcctcgcttcaccacggcacgggtcgctgagcgcgccggcgtcagcatcggttcgctgtaccagtacttccccaacaaagcagcgatcctgttccggttacagcaggatgagtggcagcagaccgccggcatggtccgcgacattctgcaggacggcacgattccgcctttgcaacggctacgccgcctggtccatgcattcatcctctccgagtgtgatgaggcgcagacacgcggagcgctgagcgacgctgcaccgctgtatcgcgacgcgccggaagtgcagcaggcacgaagcgttgccgacacggcgatggaagcgttcatggccgaggccttgcccagggcgttggaaagcacacgccggcgggctatcgatctgatcgagacctcgctgggcgcctgtgggcgcgagttctcaagcacgccgcgcagcaacgacgagatccatgcctggtcggatgccgtggccgatatgttctgcgcgtatctgcagcagctgggcgcatccgacgtaggccggccagggcggcgcgtgcggcgtcagaccgcgtag

SEQ ID NO: 535130 - DNA, 576 bp, Stenotrophomonas maltophilia
gtgaccactgccccgggcatcgaccccgaccgggaacgaccgtcgccgttcccggccagcgacagcgccgccgacattgccgccaaggtcgccgaggtgcaggccttcttcggcagcagcgaaactgctgcccgccacactgtcgccgaagcgcagcagtacgcattgagggaacgcctggaagcgcgacacgcggcacgcctggccggcatctgggtgaacaacgcaacgggctggaacgtcgtggtgcgactgaccggcggcgcacccgaggccgatgagacacatccaggcgcggacggcccgcaacgcgtgcactacatcaccggcgctgcgatgacccaggccgagatgcagcgccgcctgcacgcacagcgggactggctcctggcccagctgcccgacctgttcggctacagcctggatgtcacgaccggggagttggaggtggagctgcgggataccccagccaaccgcgcgacggcggcggttgtgcgcgaccacctgcaggtgcgactgggctacccggtcaggctgcgctggtaccctgcgaccacgcgccggtatccgccctga

SEQ ID NO: 535131 - DNA, 348 bp, Stenotrophomonas maltophilia
gtgaaacgtccccgccgctggctgttgactgcctcgatcacgacattgattgtcgctgcgctcgttgtcgcgctggccaccccactgacctcgaacgccctgctgctcctgatggagcgcagcaacttcattcctgccgaatcctcgatcctcaccttcgaaccgtatgcgatcaacgacggctcgtcgaactactggttgtacggaaaggaccggaactactactaccacttcacctacgaagatgacgtcccctacgtctacatccgggaggacaaccgctgccccggtttcgaccagcaggatgtccggacctggtgcagcgcactgcccggcaaggcacgctag

SEQ ID NO: 535132 - DNA, 930 bp, Stenotrophomonas maltophilia
atgggcatgtcactagaatccgccaacttcttccctgcccatgttggcggccggcacgtccgtgtcgcctggcacggcggcggtacagccccccactccttgcatcccgccgccatgcaccctgcccatcgccgccttctggccttcgttctgagcacctgtccactgctgcccctggccgcatgcgcgtctggatccaacgcaggtcgtgcagtggaagcagccccggcggaaggacgcttcatcgccatccatgagaaggcatccatcagggacaatcaggcagaggcccggctgtggaaggagcggaaactgctcgaggacttcgttgacgcgatgaacggctacatccgcatcccgcgtgacatcaaggtcatcgcgaaggagtgcggagagtccaatgcctacttcgatccggaaaccagcagcatcgagatgtgctacgagatgtccgcggaggagcgtgcgcgctttgaggcggcgggcgatgctgctgaagatatcgacaacgcgctgtaccagagcgcggtgggtacgctctaccacgagctgtgccatgcgctgatcagcgaactggagctgaagatcaccggccgcgaggaagacgttgcggatcagttggccgcctacgtactgaccgcagacgatgaatccagggcgttcctggtcacggttgctgatacctatgtgctgtccgcgcaggaacagacccgtatcgaagatctgcccacggcgggcacccattcgctggacttccagcgcgctgtgaatttcctgtgctacctgtacggctcggatgcgggcaccttcggttatctggtgaaggacggcacgctgcccgaggagcgtgcggagaactgcgagcacgaatatgggcagctggtcgatgcctgggagtcgctgctgaagccgtacctcaaaccggagtag

SEQ ID NO: 535133 - DNA, 678 bp, Stenotrophomonas maltophilia
gtgacgatcccttccttcccgcgccggcgcatcgccccgaccgtcatgtacccgggcaccccggtggtgctgatgaccacgctcaatcccgatggcagcagcaacatcagcccgttgtcttcattctgggcactaggcaaccggatcgtgctgggcctgggaacacagggccagggctaccgcaacctgcagctgcgcaatgagtgcgtgctgaacttccctgcagccacacaagccgagcaggtggaagccatcgcgcgcgcgaccgggcgcgatccggtgcccgaggccaagcgggccatgggctatgtgcatgtgcgcgacaagttcgcgctggccgggttcagtgccgtgccctcagcgcaggtggcaccggcaacgattgccgaatgcccgctgcaggtggaagtcacgatgatggcgatgcatgcacccagcgatgacgatggccagggcttcgtgattgccgaaggccgcatccgctgcgtgcatgcacacgaggacatcactattgcgggcagccagcacatcgacgtgacccgctggaagccgctgatctacctgttccgccactacaccggcgtgggcgaaccggtcgcgcgcaacttccgtgcagagacgccggcgcaggcggccacctcaagcagtgttgaatgcggcccggttgcgcgcgtatag

SEQ ID NO: 535134 - DNA, 519 bp, Stenotrophomonas maltophilia
atgcaacctctttcatcgaccgacgaagccccgaccctgcacctgctgtgcggcaagatcggtgcaggcaaatcgaccctgtcgcagcaactggcggcgaagccgcgccacgtcctgatcagcgaagacgcatggctggccacgctgcatccgggcgacatccactccatcgccgattacctgcagcgtgcagccacgctgcgcagtgtgctgaccgatcatctgcgtgcattgttgcgcgtgggcgtctcggtggtgctcgatttccccttcaacacgccggccgcgcgggcatgggcgcgcgaggtgttcgagccggtggatgctgcgcaccggctgcattttctcgacgttgccgacgaggtctgcaaggcgcggctgcatgcgcgcaatgcgcgcggcgagcaccccttccaggccaacgatgaggccttcgaccagatcacccgccacttcgtggcaccggcggcggaggagggcttcgtggtgatgcgctacaccgaggccggcccggtatag

SEQ ID NO: 535135 - DNA, 348 bp, Stenotrophomonas maltophilia
gtgagtcgtgacccgcgggtggcgctggaaacccagcgtcaccgccggcactggaaacagtggccctggggcctgatcgcgctgggcatggcggtgctgtcgctgtcgggcgcgttcttcattttcatgctggtgggcgcggcgatgcgtccgccaggcgatggtgcgcacgtcaacctgaagccctacgtggctgccttggcggtggcggagctgttcaccatctcggccggcttcaccgcatcggtgctggggtggaggctgaaccgaggccgggcgacggctgcactggcaatggtgctgctgtcgctgtgggtgggcatcctgctgcacgacctgttcagatga

SEQ ID NO: 535136 - DNA, 333 bp, Stenotrophomonas maltophilia
atgaatacgaccttgcaatcctcgcgcggctggccctggggcctgatcgcccttgggctgtccgtgctttcgtggacatccctgctgctgggtgtgctggcctttgctgccagcttcggctcgccgggtgacggcaaccatggcatgcaggccatgcagtactggatcctggccgcactggtcacgctgggtctgtccttcgtcggcagcctggtggcaatggtgctggcctggcgacgcagtcgtggccccgtcgcggcagcggtggccggtgcgttgctggtaatgctggtgtcgctggtcctgatcgtgatcgggtccagctggggctga

SEQ ID NO: 535137 - DNA, 489 bp, Stenotrophomonas maltophilia
atgctccgtcttgcttccactctcgcgttgctcatcatcgcgccgctggccaccgcagccagcgatccgcgcgacgtggtcacccgtctttacgccgccgtccaggcgccgacttcggacgaagcgaccattccgccgttgctgggcgatgccctgcgctcagccattgatgcgcagcgcgcctacgagcggacctgtgcggtgctggccgcgcacgacgagaagccgcatatgctcgaccagagtgcctatctgatggcgccggatcgaccggaaacggtatcggtgggaatgcccggatcgagcggtgacgccacctggctccgggtcgacatggccgtgggcgactatcgatggaccgaccgggtcctgctgcagcggcaggaccgggagtggaaggtcatggatatccgctgggggcagggcggcaacctgattggccggctcaaggagttctcggcattccgctgcacaccttcgggccgctag

SEQ ID NO: 535138 - DNA, 927 bp, Stenotrophomonas maltophilia
atgcagaagcgtgcgtgttttgatttcgaagtggcgttcagcaatggcggcggcatccagggtcagggcttccgtctggacatcgaggggagcgacatcgacgacgatgcgttggcggcctacatcatccgcgacatgcggctgttgatggtcaagcacgtacacatcctcaacaagcagatcatcgaggaagcgcacaagcgtgcggcgcccgcgcacaccattgcaccggcgccagacctcgcacccacctacatcgatctgagccactcgatcgagagcggcatggtcacctgcagggaactgcctgcaccgctcgtccacgaccacctttcacgtcacgattcgccggagccttatgccgaaggaacaacgttccagatcggccgcaccgacaaggtggccaacaccggcacccatatcgacacgccttgccagcgcagtgccgacggtcgcgatctggcgggcctcgatcttgcgcgtgtgtcgaacgtgccgggcgtgctggtgcgggtcgccggcgcactggaacaggccatcgactggcatgcgttcgctgccgtgcaatgtggcggacgcgccgtgctgatccagaccggttgggaccatcactggggcacgcaacgctatctcgaagggcatccgttcctgacggaaaaggcagcgctccatctacgtgaccagggcgccctgctcgtcggcatcgactcgcccgacatcgacgacacccgcacgggaacgcagccggtgcgctccgttctgcttggcgctggcatcccgatcatcgagcacatggcccacctcgacgcattgccactgcagggcttccatctacacgccacgccaccgccgatcgtgggcatggggcgcttcccggttcgtgcgcacgcaaccctggatccaagcagccgcgccttgccccgctga

SEQ ID NO: 535139 - DNA, 573 bp, Stenotrophomonas maltophilia
atggattctgatcacctgcacgccttcatcgccggcaccccggcactggatttcgtcgatacctacggctcccgcgccggggtcggacgggagcggctgccggatccggcggccctagtcgcctggctgaacgaggccgggttgtgggccgccaacgcccccaggaccgcctcgccggcccagttactggccgcgcacgcgctgcgcgaggccatccatcgctgcgccctttccgccatcgcctccgcaccgtttgccggcgacgaccttgcacggctcaatgacgctgcccggcacccgcctccccgcccctgtttccgcggcggccagctcgtgcaggtgtcggcgtctcccgtcgaagccgccctgtcccgcctcgccgaggatgcacttgtactgctggcctcgccacgccgcgcgcgcattcgacggtgccccggttgcgccatggtgttcgaggacacctcccggcccggcagccgccagtggtgttcgtccagccagggttgcggcaaccgcgcaaaggtccgggcccatcgggcgcggcgtacacgggacacagcgacaggatga

SEQ ID NO: 535140 - DNA, 939 bp, Stenotrophomonas maltophilia
atgctcagccttacccttgccgacctcgatcacctcggacgcagtggcggcttccgctatcgcctgcctgcgctggggtcagccgacgggtcgggcgagggctgcgtggtgaagggcagggtggagcagcgctgcctgcgcccgggcatgaccctggcgctgtcggacgtggtcgcgcatcagccattcgaggcgacctcggcgtcgcccccggcgttctcggcgatcgtgatgctggagggccgcgccggtgcccgcttggcagggcaggcggtgatcggcatgcgtccaggtgccggtgcgatggtgctggccgacgccgcgccgatgaccgcgatacacccggcgggccaacggatgcgcagcctgaatgtatcgctggacatgccggcggagcttgacgaccccgtcatcagcgaactgctgtccactgtgcgccgcgccggccagccgcagctgcgcagctggcaggtccccgcgcacctggagcacgccgccgaccagctgctgtcgagcacctggcacggtgcgatgcacgcgttgctgtgcgaaggcgttggcctgcagatgctggccatggcactgggtgcgccggaacgggatgcatcgccggagctgcgcgtttcggcgcgtgaccgccgcatgctgcagcgggtgatcgattgcctgcaggcggcgccggcagccgatcattgcctggacgatctggcgcgcctggcctgtatgagcccgagcagcctgcgcctgaagttccagcaggtgtacaggagctcggtgttcggctggctgcgcgagcatcgcctgcaactggcctgcgagcagctgcgacagggctgcagcgtgcagcaggccgcgcatttcgtcggctaccggcacgccacgaatttcgcgaccgcgttccgcgcgcgctacggcatcgtacccagccagctccgctga

SEQ ID NO: 535141 - DNA, 486 bp, Stenotrophomonas maltophilia
atgccgattgaactccgctacgcggatgtcatcgacttcctgcgcacccacgcactgctgggcatgacagccgagcagcgggcgcaatcgcttgtcgagctcggcctgatcgaggaaccggatcccgcagtggcgatacgcgcggaattcaacgcggcactgcgcgatacactggcgttcagccccttgatcaggaatgctcattgggagcgcaccattgctgcgctcaccggagctgcgatacggatcaccgaccacgccgatgcatcactcgtcggcctctgctgccctgcgtgcacgtgtctggtattcacggatgaagaagacgccttcttcgaaatctgcccggtctgcctctggcagaacgacggcaccgccggcgacgagtacagcggctgcaaccacgtcacgatgagtgcattcagaaccagtgcggacttcaccagccgggtgcaggcaggcacccttctgtaccttcagccgtag

SEQ ID NO: 535142 - DNA, 834 bp, Stenotrophomonas maltophilia
atggtaagggtattcattagctggtctggtgagcagagtaagaagtatgcggaggccattcgtgactggcttcctgcagtgattcagatggtcagtccgtacttcaccccgactgatatagagaagggtgcacgttggtcatctgatatcgccaaagagcttgagcagtctcaagttgggctaatatgtgttacgcgagacaatttgcattccgattggattctctttgaggccggtgcgctgtcaaaaagtctcgaaaaatctcatgtttgccctctcatctttggaatagctcccactgacctgtctgggccgcttaagcaatttcaggcgacttcttttgaacgtgccgatttccataagctgatttcactgatcaacgcaaagttgggggatgctcggctgccggccaagacgctggatgctgtctttgataaatggtggcctgatcttcaggcgcggattgagcaaatatccgatgcgtcgggtggtggttcatctgagccggtgcgcacggagcgtgagctcattgaagaaatcctcacgatcaataggtccatgcaaagattgcaggggcgtccttccattcctgcacgggcgatccaagagctaatcgaaaatcatattgagttgcacgatgatcaagcgcgagagctgtccggttaccaggatgctctggatctcatgaaaaaatcgcataagccgctcgcatacattgcagggaagtacaagggcatttcagacgagatggacaatgtaatcgccgatttggttcggctagactacgatgtcattggaagtcagtctgaagaagaggccgatatacctttttga

SEQ ID NO: 535143 - DNA, 894 bp, Stenotrophomonas maltophilia
atgatgaatcttgcccattggcgcctgctggttgcggtggctgacgagggaaccatctcgcgtggcgctgatcgcgtcggcatcagccagtccggtgccagccaggccctggcgcagctggaagcggccctggggtttgcggtgttcaatcgtgagcgccggcaggtgggcatcaccgccctgggggagcaggtgatcgatcacgcacggacgatgctggcggggctgcaggccattcgcacccttgctgacgacagccgggggctgagtggcgcccgcatccggttggcgagcttcccctcgatcgtttcaaccgtgctgcccgcgctgttgcgtgacttccagcgccgtcacccgggtatcgaagtcgtggtcgtggagggcacggatgaggaggtggaacgctggctggaatcagacgcggtcgatgctggagtggtgatgaatccggtggatgagcgatccccgctgatgctcggcagcgatgtatggatggcggtgctgccgcaggcgcatcccttgggacgtcgcgccacagcacgcgggatcgggttggacgaactggccactgagcccttcatcctcgccactggtggttgcgcggtgaatggtcagcgtttgatggaagaggccggtttgcagctgacggatgtgcggatcacggtgcgcgactgggccagtgcgtgcgtgctggtccgcgagggcatgggtgtttcgctggtgccggaatcgaccctgccagcggatcgtcatggtctgcgagtgctgccggtaagcccgggcatccaccgtgtatttggtctggtctgctcggcggcgggacgcgcgtcgcgggcgactcaggcgttcgtgcggggcctggacgtcgttgtggatgcatcggcgccacattga

SEQ ID NO: 535144 - DNA, 882 bp, Stenotrophomonas maltophilia
atggacacggcagccccctggttcgcggacctgtgtagacagcatggattggcggccgaggctgaggcattgtccagcctgctgcgcccttgtctggcgctggtgccctgtgccgatgacgcaccggtgctgggggcatcgcgcaagggtggtggccccgatgtacccgaagggtttgaatggccggttcaccgggggcgtgcgttggacttcctgctgcagatcaacctggctgacctgcccaatacaccgaccgtgctggatcttccgcaaacggggttgttgtcgttcttctacgatatcgatgatcagccttggggctatgagccggagcactgcaccggtcaccgggtgttcctcttcaatgtcgatgagctggaacggcgtctgccggccgtcgatgaagagcttgcactggcagctgctgcacttgagctgcgtccggctcttcgtctgccgcatccgttttcggccgacggtgagcgagtgggcgagtacctgaaggaactgggttccagcgtggaagcgagcatcgaagaggcgtacttcgaactgaccgatgcggtcgcggctcatcatgttggcaggggcaagcccctgcacgtgctgggcggccatgcgcacaacatccagggtgacatgcagctggaagcgcagctggtcacgcatggcctgtcgtgcggcgatggtaccgcttaccgcgatccgcgtcgggcggcgctggaacaggaacgcgagcagtggcaactgctgttgcagctggactcggcagacgacgacgcgatgtggggagattctgggatgctgtacgtctggatccgccggcaggatctggcggcgcgcgatttttcgcagacctggatggcgctgcagtgctgttga

SEQ ID NO: 535145 - DNA, 684 bp, Stenotrophomonas maltophilia
atgaaattcggttcacttgtcccgcttgtctttctcgttacaggtgcttcagagcagagccacgctgccacgaacgaacgcgccggatttatccatccatcccatcggatcatcaagtctgacagcctggatgccctccagaatggcgtgcgcctggagctcctcagtgacggttcggggagccttctcttccagccatggtcgcaaacgcccgaggtgattcaagtgcaccgggatgtatgtcgtagttttggccgaactcctgcgacagacgtttcggtcacgctgggaccagatgtcgagtttgcctttccgtgcgagtcggagatcacacctttgcaagcaacgccgagaacccaaccttgtcacgccagtgcgacaatgagtggcccgggtgcagtgattcagggcgtgcaggacattttcgagggcgaggcccttctggagaaagatgggcgctgggggagcgtatcgggatcattggcagtgacagtcgctggcctttgcgcaacgaccatccatgcagaggtcataggcggcgctggcgcaagtagaaacctccatctccccatcggctgcacgcttcaatcgcctgggctgtttgattcagcagcgacagcggctatatgcgaagaatccgatgtttcaacgcactccttcacggtcattcctggcgcgccataa

SEQ ID NO: 535146 - DNA, 534 bp, Stenotrophomonas maltophilia
atgcgcaggatcctgttcctgatcgcgccagtggtgctgctgggctgttcgcgcccggcagcacaggcgaccgctgacatcgcggcagcgcccgctcccgtcgccgcagcagcggacgccagccccggcccggatcgcgcagcgctgcaggcaagcgaaatgccgctgctgtccgctgtcgccgacggtgccgagccgccatcaacgatgctcaaccgctacgtggcggcactgctcaaccgcgaccgcgccgccagcgatgccgcctggacgatcccacccggcgacccgcggcatgcggacgacgccgcgctgcggcagctgcaggacctgcgcaccttgcgcctgcacagcgataccccgatcgcccgcgacgaccggcagccaccgcagctgctcgaagtgccggtgcagatccgcgcggtcaccgccaacgggaccttccgcttcggcggctggtaccgcgtgcaacccagcagcgatggcaacgcgtggcagatccagtccgcgcaactgcgtccaatgctggactga

SEQ ID NO: 535147 - DNA, 1512 bp, Stenotrophomonas maltophilia
atggcagcagcgcaggataagcccgtacgtgtcgtcgatctgcacacccatctgttcaatgcgcggcatctgccgctggaaagcatcatcgccggcgcgatgggtgcgtggtcaagtcccttggcccgacctctggcgaagctgttgtacctgctgacggaaacaacgggcgagcaggcggagttctctcggctacagcagttgcacctgcatagtcttcatgaccatggcgggcacgaacagatcgactacattgcgtcgatctgcaacgtcgccagccatgagttccaggtgggcattgcggcgggactgccggatgccgatggtctggccgcgctgaccgccgactcaccgcaagcagacgccatgcggggctccgacctgatggcgattctccgtgagctggagcaggccatttctgcaacgggtgggcccgacaccgccgccgcgccgtccaccgattctctcgtgcaggaattgatggcgccggcaggtctggtcgactgggcgcgcagtaccgtgaagcgcgcgctggaacgtttcatggcactggtggtgcgtgatccgacgagtacgatcggcaactacgccgagttcttcttcactctgctgggttcagaggaaacgattttccagcgcttgcaggtggcgtacggtgagtccctgccctccatggagtacgcccatctgatgatggacatggagctggcgtacccgggcgggccaatggccaactatcacctgcccaagcgcaccgggaacatggtgaaactgcagaagaagttcccggagctgcatggctttttcgcattcgatccgcgccgcgatgatccgaatccgcgcggctggaaagggttgcttgaatccgcactcaaggatggattcattggtttcaagttctatccggcgatgggttacaagccccatggggacgcggtccatgcccggcggatcaacgagttctacgacttctgcctggagcatgacacgccgatcttcgcgcattgcaccccggtggggtttcagaccccgcgcaaggagggagcgttcgcgaacccggaatactgggccgatgtgctgagcagctgcaaagaactgcgattgtgcctgggacacgccggcgggcagcgcgctcccagggaaaggccggtttcggctggctgggatgcagaagaggtcgagtggaagaagggcaactatgcatggcaggtggttgacctgtgtgtccgataccccaacgtgtactgcgagatagggcatctggaaggcctgcttggcggggacatgtcggacttcgagcggaacctgagacgcgcccgggatacgcagatggattacgggttcatgagcaaggtcgcttatggttccgactggcacatgcaggcaatggtcaactcggcccgtagctaccttgatctgttcctgaagctgtttgaaaaggaggagtggcgggagcaccgggagcgcttcttctggcagaacgcccatgcgtacatgcggctgccacgatga

SEQ ID NO: 535148 - DNA, 921 bp, Stenotrophomonas maltophilia
atgagccttgccctgctctgccccggccaaggtgcacagcatgcggcgatgttcgaccgcgtgcgcgatctgcccgcggcccgcgatgtcctgcaggccgcgagcgcggtactggaccgtgatgtcttcgcggccgctgccgacgaagcgcgcttcgacaatgtgctggcgcaaccgctgctgtgtgcggctacgctggcgcactggctgggcctgcgcgacggcctgccggcgccggtggtcgtggcgggctacagcattggtgaactggccgcgcattcggtttccggcagcgtcgacgccgcaacctgcctggccctggccgcacagcgcgcgcggctgatggatgccgccagccctgccgatgcgggcatgcaggcggtgctggggctgcggcgccacaccctgcagccactgtgcgatgcacacggcgcgcatgtggccatcgccaacgggcaggatcatttcatcgttggcggcacgcaggcgtccctgcaggcgctggccgagccagcacgcgcacagggtgcggaggtccgcccgttgccggtgcatgtgccggcacacacgccgctgctggccagtgcggtggcaccgtttgccaccgcgcttgatgcatcgtcgctgcaggcgccgcgcctgccgctgctggccggcatcgatgcgcgcccggtacgggaccgcgcagcagtggtgcacacgctgtcggcgcaattggcacagaccatcgaatgggcgcaggtgatgcgccaggccttcgagcgtggcgcgcgggtattcctgcagctgggcccgggcaacgcattggcgcgcatggtcgcgccggcctatccgtgctgcgaagtgcgcgcggtggaagagttccagagccttgaaggcgccgcggcctgggtccgcagcgcgctggagcggctgcagtaa

SEQ ID NO: 535149 - DNA, 858 bp, Stenotrophomonas maltophilia
atgaacgccttcgcgcaggccgcccggtcggttgcgcatcgcgtcgacagcgcgcgtctggggcgcctggccgtcgccagcctgcatgcggaactggcgctggcaccgaagccaggcctggtcactccgttcgataccggcagccatcacgacatggatgccggcacgttcctgcgcagcctgttcgcactgcgccactacttcaccgcgattgcctgcgccggtgccgacgatgcaccgttcgccgccctgcgcgcgcacggccttgccgccgagagcgcgatgctgcgcgccaccggcggcatcaatacccatcgcggtgccatcttcagcctgggcctgctggtagccgccgccgcacgctgccgccgccagcagggccacgccccgcccgccgcgcaggtctgtcttggcgtgcagcactgggccgatgacttcgccgctgcgccgctggatgcatccagccccggccagcgcgcgcgcctgcgccacggtgtcgcgggtgtccgcgagcaggccgccgccggctaccccctgctgcgcgaactggccgtacccaccctgcgccacgccctgcaccatggccttgcgcgcgatgcggccatgagccagaccttgatgcagctggttgcgcaggtggatgacctgaacctgctgcatcgcggcggcgctgaaggcctgcgctgggcgcagcagcaggcccaccgtttcctggccgagggcggcgcgttcgcacccggctggcaggcacgcctgcacgtccttggcgagggcttcatcgcccgtcgcctgagccccggtgggagtgccgacctgctggcctgcgcctggttcctgctgcagcaggagggcgcatga

SEQ ID NO: 535150 - DNA, 477 bp, Stenotrophomonas maltophilia
atggatctacggacattggccgccggcatggcacgcctgcgcaggctcacccgcgtagtggccttcgcactgctggggctctatgtgttgggaatgctggtggggcaattggtgaagggcgcgccgccaccgctgtgggcatggggtctacccctgctgttcgcgggcgtgatctggttcgatgtgcgccatctgttggcgcgtagcgatgcagtgcgtgcggtcagcgctttcgaccaggccagggaaaaactgtcatcgttggacgaggcctcgcgcgttgcacacctgctgcgtctgaagcggcggatgttggcggccggcgtgtcattgatcgccagcatcgtcacgttgctgttcgtacccgacgatcacccgcgtgcggttgcctggacgtggctgtggctgttcgtcagtgcgttcatgacgttcacctactgcggcggactcctgctggcacgccgctggctgcggtga

SEQ ID NO: 535151 - DNA, 807 bp, Stenotrophomonas maltophilia
atgcctaaaaactgggaacacgctgcaggattgctgtggccagtactgactaaagcagcaaaggctgggagcctgcttgagtatggggacgtcgcgcccgtcattgggaccaatcctctctcagttcgttatgcccttgacccgatccagagccattgtatgaggatggggctgccgcccttgactgccattctggtgaatgccaattcaagagtgccggggaaggggttcatcgcgtgggcgattgaggacatcgcaaccgctcataaagaagtttatgcagagaactgggacgcccacgagaatccctactacggcttctcggagtctgatacggacgattcacttgctcggcgtgttcttgagaatccggaaggggccggagaggtctacgccctgataaagacccgtggagctgctcagcgtatctttaggcgcgctttgattttggaatacggaaggtgcgcgatgtgtgggctaaccttccaggatgctttggacgccgctcacctcaagccgtggtccgcatgtagtccgtcagagaggttggacccgcgaaatggcttggctctctgcgctacgcatcatcggctcttcgaccttggatacgtcacgttggatgacgaattgcgagtcctctactctgatccagaagccagcgatggcgattactcgccatctgatcgagagtgcacattgatgttgcattacacgcctgcccattttggcggcgcggaactccgtccccaacttgaaatgctgagaaaacaccgtcagatcaactggaaggtgatcgggaccccttag

SEQ ID NO: 535152 - DNA, 867 bp, Stenotrophomonas maltophilia
atgaaaaccctgctgttccccctgcttgccaccctggcgctggccgcctgctcgtcaaaggtcgattttgagatcgacaacccgaccgacgcgccgctggccatcagcgtcgatggcaaggacctgccggtggcggccaatgcatcgcgcccgatcagcctggccccgggcgaacatcgcctgcataccgagcgcctgggtgatgtgcgcttcaacgtctacgccggcagccgcggcggcctgatcaacccgaccctcagcgagtacgtcaccgcgcgcgagatctacgtcaccagtgaagacaagctgaaaaactttggtgcaagcggcctcggcatcgacgtgggcggggtggagttcaagggtccgttcgacaagttccacggcctgttcatcgacaagacctggaatttcggcgtgcgcgaaccgttcccgcaggaacaggtcgtggcccacgtcgattccaccggcggcaagatcagtaccaagatcttcaccgcccccgagttcatccgttatgtcgaggaaggcatgggcgaaccaggcgcgtacaagcgcgagcagccggccggctacgttgcgccggtctacaccctggaaccggccccggccaccctgcccgccctcgatccggctttcgaggcccacgctggcccgatgcgggacatctacacccgttggctgaaggccaccaccgccgccgagcagaaggcgctgcgcaaggaagacttcgaggccagcatggcgttcacccacgccaccgcaacgctgggctcgaagctgccggtggcagccaacgaggcctacaacgacttcgtcaccgtgcgcagcaccgaaatggcccgcagcgccctggtcctgccctga

SEQ ID NO: 535153 - DNA, 984 bp, Stenotrophomonas maltophilia
atgcgctttctgatcatcgtgctgtcgcttctgttgtttccatcgctcagcgcggcgcaggtacctgcgcccacctggccatcaaaaacctactatcgaacgatcgagatcgatggcgagaagaccttctaccgggaagccggcgatccacgccatccgaccgttctgctgctgcacggctttccctcgtcatcgcatacgtacagggaactgatcccgctgctgtccggccgctatcacgtgatcgcgccggattatctgggctcgggactgaccacgcatccggatccgttcctgcagccctatacgttccagcgcctggcagaacacatcgcacgcttcactgatgctctggacctgcagcattacagcctctacatgcaggacttcggtgcgccggtcggcttccgcctcatgctcctgcaacccgaccggctccaggcgctgctcgtccagaacgccaatgcctacctcgaaggcctcactgccgcacgcctggacttcttcaggcaggcccatcttgatcgaacgccagcgaggctgctgcagcttcacggcctgaccagcccggaaggggtcaagaacctgcagtatctgcgcgacgtcaatgggcatccggagaggatcagtccggacgcgtggcagcacgacctggccggcctcgggagccatgcccagcaggtcgcccaggtccagctgttccaggactactgggccaacatagaagcgtatccacagtggcaggccttcctgcgcatgcggcgcccgcccacgctggtcatgtggggccgccacgatcccgccttcatcagccccggcgcgaccgcattcacgcgcgacatcccggatgccgaagtccatctgctcgacgcgggtcacttcgtggtggaggaacgccccgttgaaatcgcccagcacatcattcgatttctagagaaactcgatcagcatgagggaactggtccgcggccaggtgcagactga

SEQ ID NO: 535154 - DNA, 1446 bp, Stenotrophomonas maltophilia
atgacgaccctttcagcagaaacggaacgcctgctgggcgaattcgcgggcaagaccgacgtcaccaccgaccaggtcgacaacctgcgccggatcatcgtcgagtccccggtgctggcaaaacaggtggacgctgccatcgcggcaggccacctgaagcacttcgaactgcagccggcggataccagcgcgggcggcacctaccttggggatacgaagtcgatcgcgctgcccgcatcggcgctgaccacgcccgccgcgccggacaagctggatgcggcagacctgaccttcgtgctgggccacgagatccagcatgggttcaatcacgccgagaccacgcgtgccctggagcagttcgacgacgatctgatggaggttgccggtcgccccaccggtcatgactacaccgaggcgatcggcaccctgttggccgccaaccggcgcgatgaggcctcggccaacatcgagggctggaacgccctggcaagccgggtccagactgcgaaaccggacgccacgctgggggacctgtacgacgccagcacacgctcgaaacagttcgtgagcctgcagccgggtccgccgatcacctatgccgcgcatcccgacctgacgctcaacgatgatctgagcatgaccgccacggcggccaacatcgaaggcatgggcaagcactactacgacgagggcgtgagctcacaactgggccacaacagcaattcggattaccagaactactacggtgcctacgccatcagcctcgcctgccagtacgaggcggtcaatccggcgccggacggcatcagccggatggaggtcaacatgcagaagctgggcctgcaggaaagcctgctggagcagaacggcctggacttcggcgaggcttcgcccccgcgccaaccctacttcgacaccagcacttcaccttccacgctgcactacttcgatcacaccgtcgatacgcacgtccacctgccgatcactgcgaagccccccgtcaacacgccgctacagccgatgggtgccgacatcccggtttcgcttgtggaagcgcgtgaccgtttcctgcatgagcagatccgcggcaaggtggcagaactggatgccgccaacgggcgcagcttcgatgcgtccagcgaacgcctgagtgccagcctgctggtgctggcccgcgagaacgggctggaccgggtggaccacgtggtgctcagccggcagaccgagggtgcgggtgctgcgcagaacatcttcgtggtgaaaggggcgctggatgatccgtcctcgctgcgcgcacactcgcccaccgcagaagcggcgcagcgccctgtgcaggaaagcctggacagtctggccgtggtcaaccagcgtcaggccgagcaggcctcgcaggaacagacccgcacccaggtgcaggaacagcagcgcagcgcgttgtcgcactga

SEQ ID NO: 535155 - DNA, 507 bp, Stenotrophomonas maltophilia
atggccccctccgtatccgagaccgccccgccttctccgcttgatgccgagcagctgctgctgcgcctgctggacctgatcaaggccacgacctccacccgcgacctgaccgtcgaacgcctgtctgccgcaatgcaggcaccggcgcagaccttcggccccgggcacttcggctacggcggcacgctgaccccggaatggggctatggcctggaagtgaagcgcgccggcgcagccgatgcacgcctggacctgaacttcatcgacaccagcgccgaccgcagggcctcagccgcggccatctgcaagatcgacttcaaccacgtcgcctcggcgctggaagcggcgggtttcaagcgcgagacggtgcgcggcgaacacggccgggtgatccatgagcgcttcaatcgaccgcaactgagcatcaaggtcgacacgatgccagagaaccccaacaccgccggcgacgccacgcatgcctgcgtgcgtctcgtgaccgtgcagtaa

SEQ ID NO: 535156 - DNA, 450 bp, Stenotrophomonas maltophilia
atgattcccgaacgcgagagggcaggcgtgctgatccgcctgttcaccgcacttttcctgctgttccccggccttgcactggtggtttccacgtatcggcacgggtacgtgacggccctcgccatggtggtgttcgtcgccgtgcacgccacagtgcacgtgctggcggcatggcggagggctgcctcgcgccccgctcccccgctcctgcatgccctggatgcgcgtgcagccaccgtcatgcttgccgcctcgttgctgaccgtcgcgatcagcgcagcagccgcgaggttgcccgccactgcgtgtgccgcactgctggccggcgcggtgctgcagctctggagcctgcgcacggcgacgcaacgattgcgccacgcgctgctggcaatcggcagcatgctccagttcattgcgatggcactgctcacgctcggcattgcccactga

SEQ ID NO: 535157 - DNA, 531 bp, Stenotrophomonas maltophilia
atgaacttcatgcctcttgcaccgtggccactgaccaagcagaccaatggcttgattgccaccgacaaggcctccctggccaagctttggaatgacatcgatgaggcgacggaaccggggctttccggctccatcggctgctacattttttcgatccgcgccggcaagggttccctgccatggtatgtgggaatggcagagaagcagtcgtttcgaaaggagtgcttcactccgcacaaaataaatcactacaacaatgcgatcgcgagccggcggggaacacctgaaatcacgttgattcccaagtacaccaaaggtgaaaagctggtcaatccgaccgggaacacgcaccgtgatatccaacagctggaggcgatgctcattggcaactgccttacccgaaatcgcggccttctcaatcttcgcgacaccaagcttctgagggaaatgatcgtccctgggcttctcaactcgccttccggaaatcccggtagcagtgtcagatcattcaaaagattgattggcgtctga

SEQ ID NO: 535158 - DNA, 624 bp, Stenotrophomonas maltophilia
atgcgcaagatgctcctgccaacctgcctgctgctggcagcaccgctgctggcgtcggccagcgatgagctcagctacacctatgtggagggtggctggaaccgactgaagctcgatgccggtaacgccgctgacttcaccacagatggcggctatgcccgcggttcgttcgcggtcacgccacagttccatgtaatcgccggcgcgtcacgcgtcagcggaagtgaccgccggggcgctgcgcgggtgaaaaccacgctcgacgttccgtacctgggcttgggatatcacgcaccgatcagcgaccgtctggacttcaccagcgagtttgcctggaatcaccgttcggcgacgtcggactaccgcctcggcgatgcacgttcccgccagacctctcgattcaacgaggtagtgggcatggtgggtgtgcgcggcaggttcaccgagcagatcgaaggctggctgaagggcggctacgccaatggcggtgacgggcaggatgcccgctggtacggcgtggtgggcggacagctgaacatcaccgataggtggggggtggtactggaaggccagttcgacaaggacacatccgagtacagggcgggcgtacgcgccagcttctag

SEQ ID NO: 535159 - DNA, 858 bp, Stenotrophomonas maltophilia
atgaccgacccggtgagcacaacgggaggattgcgaccgtatgcttcttcaaggcggaaccccctggtgggcttcgtgtccacgcccatccggcatcgccacctcatcttccgcctcatccagcgggagatcgtcggccgatatcgcggttcattcgctggcctggcgtggtcattcatcacgccgttgatcatgctggtcctgtatacgttcgttttctcggtcgtgttcaaggcgaagtggaaggacttcgatacgagtggcggcttcgcgctgatcctgttttccggcctcatcgtgcatggcctgctggccgagtgcatcaaccgctccccgggtctgattaccggcaacgccaattacgtcaagaagatggtcttcccactggagatctacgcctgggtgaccgtcggttcggccgtcttccacgcaggcatcagctggctggtcctgaccatcgcccaggtctgcatgggggttccgttgccttggacggctgtgctgttcccggtcgtgatgattcccctgctgctgggctgcctgggcgtgtcttggttcctgtcggcgctgggggtctatttccgggacatcgtccagatcactggcacgctttccacgctgttgctgttcctgtcgccggtgttctatgcgctggattcaattccgccgaagtacaggccgctgatcgagatgaatccgcttaccggcgtgcttgagtcggcgcgcaaggtcctgatgttcggcgagcttccgtccatctcgaacctgctgatcggttccctcattggcttggccgttgcctacgtcggctatttcttcttccagaagtcgcgggatggatttgccgatgtcatctga

SEQ ID NO: 535160 - DNA, 1413 bp, Stenotrophomonas maltophilia
atgtcatctgacccgatcgcattgaaggtcgatggtgtgtccaaacactatgagatctacgcttctccgcagcagcggctgaaggcagccctgttcaatcaggcagccagcatgctgggacgtcgacgtgagtcctcagggcgccggttcagtgcgctcgatgacgtctccttcagcatccgcaagggtgaaaccgtcggaatcatcggtcgcaacggttcgggcaagtccaccctgctgcagttgctcagcggcacgttgtcaccgagtgccgggcagatcctggtcgatggccgggtcgctcctctgctggagcttggcgcgggcttcaatcctgaattcaccggccgcgaaaacgtgttcttcaatggttcgctgctgggtctgtctgaagatcggctgcgcgagaagtacgactcgatcgtcgaattcgccgatatcggcgaattcatcgatcagcccgtcaaaacctattccagcggcatgttcgttcgcctggcattcgcagtgattgcccacgtcgaggccgacatcctggtcatcgacgaggccctgagcgtcggtgatgcctttttcgtgcagaagtgcatgcggttcctgcgcgagttcatgaagaatggcaccgtggtgtttgtctcccatgacaccgccgcggtcatcaatctctgtgatcgggtgatctggctttcgcatggcaaggtcgttgccgatggctctccgaaagaggtcacggccaagtacctggaagacctgtatgcggtggagatggcggcggctggcccagcgccggcagtgaacgctgcggaagccggtgagggcggcaggccggcacccgccaatgaaccgggtcaaatggccatggcgccacgcgatttccgccaggacttgatcaattccagcgcacagcgggtcgatgtccggctgttcgaattcaatcgtgagaacggattcggactggggggggcgcagattgaatcggtcagcttcgttgatgccagcaacaggccgctggcctgggtgatcggcggtgagccggttcggctgcagattcgatgccggacccaggtggcgttggcatcgcccatcatcggcttcgaggtctatgatcgcctggggcagaccttgttcgccgacaacacgtacgtcgcttcggcagagcccccgccgctggttgcaccgggcgaggtcctgaccgccgcgttcgatttccgcatgcccgtgctgcgcgaaggtgactacacacttagcgcagcaatcgccgatggcaaccaggaacgccacgtgcagcaccattggttgcacgacgccttggccttccatgtacacgcaaagggcgtctgccttggcatgttcggcgcccccatgcagcgcgtacatcttgccgtggaagcggaagatgccgttgccgaatga

SEQ ID NO: 535161 - DNA, 1176 bp, Stenotrophomonas maltophilia
atgacatcgcagaatgacgtacaaaccaacgatctggagttcaccggcgagcgcttcatgcccgaagtcgctggccagatcgccttcgagcacctgcatcggtatcactttgcctcgcgcttctgtcaaggcaagcgggtgctcgatgtggcctgtggcgaaggctatggcagccgcattctgtccaacgctgcgtcgtcagtggtgggtgtggacatctcagcggaggccgttgcccacgcgcagggcaagtacgcgcgcggttcgctggagttcgtggaagcgtccgctgcctcgttgccgttgccggatgactcgttcgatgttgttgtcagcttcgaaaccattgagcatcacgaccagcatgaggaaatgctgtccgagattcgtcgcgtcctgcgtccaggcggcctgctggtgctctcgagcccgaacaagcagtactactccatcgagccgggatacgccaatccgtaccacgtaaaggagctcttccgcgaagagttgctcgccttggctggccgccatttcagtgccgtccagatctactcgcagcgcgtggtgcatggctccctgctcattgcggagggcaaggctgcatttgattcaatccttgggacgggcccggacagcagcgagagcgagcgtggactgagccgccccctctacgatctcatcctggccagtgatggagagcttccggaagcagaatccagcttctatgagatgaaggtccatgggctggacgctgcgacgttctacggcgtgcacctgctcgagcgcgtcagcagcgccgatcatcaggtggctgtactgcaggcaaagatcgacggccagtcgcacgatgagctcctgcgccagctgtcgcggcagcacgatgcgttgcggggagtcggtgagcaggtgcgacatctggaaggcctgctggcgacatcgcagcagaccctgctcacccagtttgccggcgaaggggcgcttcgcgatgaactggcgcgcctggtggcgcagcacaatgaagaccgcgagcaggttcagcaactccagctggctgtcactgagcagcgcttgattggcgagcagcgggagcgcgaggtccagttactgaaggagtctcgcagttggcggtacactggctggctacgccgattgaccggtagcgcacggaggcacctgtaa

SEQ ID NO: 535162 - DNA, 3366 bp, Stenotrophomonas maltophilia
atgcatcagaatcacaacggcggcaagctcggagcgttcgccaggcgcatctacatggctgtgcccggctggaacgcccgattggcactgaaagacttcctgttccgcaatttcagttttgcatttgccaacaccaacgcgtaccgccgctggcgggcactgggcgctgggcagcggctgtctgctgaaacgtttgccaaatcgccgccgccggcaaccgcaaccctggttgccgagggcgtcaaggtgccggccgtagcgcgtctttacgctggcgcagtggatgccgccgcgggcgtacgcggcccggagtacgtcgagttgtcgccagcactgcaaccgccggcgaccctgcgcttcaagtccatcgctttctatcttccgcaattccatccattcgcggagaacgacgcatggtggggacgcgggttcaccgagtggaccaacgtcagcaaggcggtgccccagtttgctggacaccgccagccccacctgccgggcgagcttggtttctacgatctgcgcctgatcgatgtactcaagcgccaggccgaactggccaagctcttcggtctgcatggtttctgcttccaccactattggttctctggccatcgcctgatggaacggccggtcgatcaattgctggagcacccggagatcgacctgccgttctgcatctgctgggccaatgaaaactggacccgacgttgggacggtcatgagaatgacgttctgattgggcagaactacacggctgacaatgatctggcgttcatccgtgacgccatgccatacctgtccgatgcccgctatatccgtatcgatggacggccgctgctgatcatctaccgtccttcgttgctccctgatgcgcgcagttcgctcgagacctggcgggcgtacgcgcgcgaacatggcctgggtgagctgttcatcgccatggtgcagttcgacgtggatgacccacggacctacggctttgatgccgcactggagttcccgccgcacaaggttgcccgcaacctgcccagcatcaaccacaccctggacatcgccaatccgcggtacgaaggctacgtggtggactaccgcgagatggccaagcgctcccgcgagtggcccgccgaagactatcccctgttcaagggggttacgccgcgttgggacaatgaagcgcgcaagccaggtcggggttacacctttgcccactcctcgcctgacgagtaccagcggtggcttgaatcggctggtgagttcgctctcgccaatccggtccgtggcgagagtttggtcttcatcaatgcgtggaatgaatgggccgaaggtgcgcaccttgaacctgatcgccactacggctatgcgttcctgcaggccacgcgaaacgcaacggccggcacaggtcgtgcacgcatcgcgctggtgtcacatgacgcgcatcctcatggcgcacagtatcttgcgctgaacatggccaggaagatggctgccgggctggacctggacgtgcatgtcgtcctgcttgaggatgggaggctacgttcccagtttgaagagtgcgccaccgtccatctcctcggcgatcgggacgcggccgctctggccctcgagctgcggcagctgggtatccgctctgtgctggccaacactgcggtcagcggtcgcatcgtcaaggccctggaccatgcgggcctgaccgtggtttccatgattcatgagctgcctggagtgatccagagctacggactgcagccagcattggcggatatctcgcgtgttgcccgccgtatcgtcgttgcgtccgatgccgtccgcgatgggttgcagccgtatctggaagacgctgggcgcggcaaggtgaccaagttgccacaggggctttttgcggctaatcgtcaccgtggtcgccaggatcgcagcgcggcacgactggccctgcggaagcggctaggtctggagccgaccgacaggatcgtgctgtctgtcggctatgccgatgcgcgcaaaggcgtggatctactggccgaggcggtcgccggcgccttcgcccagcgtaccgatgtgcacgtcgtttgggtcggccatcgtgaagaggccgcctgtgaatcagcgacaaagatcctggcgcggcatggcatgaccgagcgcttccactttgtgggcctggatttcgacacggatgattactacgccggttccgacgtctatgcgcttgcttcgagggaggatcccttcccgtcagtggtgctggaagccctgtccgtagagctgccggtggtggcttttgccggcacaggtggcggtgcggacctgattgcagagcatcactgtgggctggtggtgccggcgctggatgccacggcctatggcgccgcgttggcgcaattgatcgacgatccggagcagcaggtgaccacgggccgtgcagggcgccgcctggtcaacgctgatttctcgttccgcgcctatctgctcgatctgctcgatatggcggggcatcgcattccgcgcgtgtcggtcatcgtgccgaactacaactacgcgcattaccttgagcagcgtcttgcctcgatctatggccaggcgttcccgctttacgaggtgatcatccttgacgacgcatcttccgacggcagcctgggcgaactggagcggctgtggccgaggctggaccccgagccgcgcctggaagcgtctacggccaacagcggctcggtgttccgccagtggatgaagggaatcagcctggcgcggggcgagtatgtgtggatcgctgaagccgatgacctgtcaaagccggacttcctgggctcactggtcgatctgctggaggccaatccgcgctcggtgcttgcgtattcgcagtcggagcagattgatgagttcggcgatgtcatggccgccgattacctggactatacgaacgatctttcgcgtgagcgctggtgcagcagctactctgcccagggagccgaggaagtcgaggcgggccttgctgtgaagaacaccctgcccaacgtcagcgctgtgctgttccgtcgtgagccgctgttgagggtgatgcagtcccatatcgaggaggtcgcccagttccgcatcgcgggcgattggctggtctacctgctgttgttgcgcgaaggtggcctgagtttcaatgccgaggcgctgaacaagcaccgtcgccatgggaacagcgtaacgctgggctccaaggcgcaggggcatctggacgagatccgccgcctgcacgcccacgccgagcggctgttcccgctcagcgctgcgacacgcgccgcggctgcgggttatgaaggcaagctcagggcgcagttcggtctgcacgacggtccagcagtgacggagtga

SEQ ID NO: 535163 - DNA, 927 bp, Stenotrophomonas maltophilia
atgaaggcactggtcatcggcggcaacgggttcatcggcacccacctcgtgcgggcgctgtgcaggcgtggcgataccgtcgtggtccttgaccgcttcgcgccacgcgcggacggaaacctggccggtgtggactatcacgtcggcgatttccacgatccattgttgttgcggcgtgtgcttccaggtgttgacgcggtttaccacctcgccagctgtaccgtgcccagcactgccgatgccgatccggagtccgacgtccaaggcaacctgctcggcacgctcgccctgctcgcaacgatgcgcgagcagggcatccggcgcatctgctacttctcatccggtggcaccgtgtatggcaacccggagcgggtgcccgtgccggaaagccacgcgctgcggccgatctcgtcctacgggatcgtcaaggtggccatcgagcagtacctggccatgttccagcggcagggctggcttgatccggtcatcatccggccatccaacccgtatgggcctgggcaggcgctggggggcatccagggcgccgtcgcggttttcctgggcaaggcgctggctggccagcgagtgcagatatggggggacggcgagatcatccgcgactatgtctatattgatgacgtggtcgacttggcgatgctggccgttgactcggggaagaacagtgttttcaatgtcgggtcaggcgcaggcaacagtctgaatgccctctgcgatactatccgcagggtgaccggaatccctgtgcaggtggactacctgccggggcggtcatttgacgtcaaggctgtcgtgttggatgttacgcaggcccgtgaacagctgggctggtatccgcgaatcgatcttgaggctggcgtccgacgcacgtggcaggctatcgagggtgcttcctcgtcccttccctga

SEQ ID NO: 535164 - DNA, 885 bp, Stenotrophomonas maltophilia
atgtatcccagcttgatgtggtacgactcggtagtatcgctgaccgctgcggtccaggatcaactggacgacatgcgcgaaatcgatgcggcaattgcggccaagtcggtattcgaaggctactgcgtgcattgtcgccatgtcgtggacatggcggtcaatggcggtgcgatgttcggcgacgatgtcaatcttcgcgagggactggtttgccaacgctgcggattgaacgcacgttccaggcagttgttcatcacggccaggcgcctgtttgccgatgacgcgaagctggcgctgctggaggcattcagtccactggggcgctattgcgcggcgacatggcaggattgccgtctttcggaattccatgacgcggccgcggtgagcggcgtgatctgcgagttcccgggcagagaggggcaggaggaccagccccggcatgccgtccatcaggacatgcaggcattgtcgtttgccgatggggagctggacgggatcctgcacaacgacgttctcgagcacgtgccggatgcttcgagggctttgcgtcaatgcagccgtgtactgaaggaggatggcatcctcctgttcaatgtcccatggttcccttggctgccgcagaccctggtgcgcggacggctcgacgtggacggtgtcctgcacgaattcctgccgaccgagatgcacggtgatgggttgcggccggaaggcgtctacactttcaacagcttcggtgccgaccttccagaactgcttctggatgccggcttccgtaacgtccagtttggcctttcctacgcgccgtacgcggggatggtcacgaacaactaccggtacggcgacgattttcttatgctgccggtggtcgtcaaagctgtccgctga

SEQ ID NO: 535165 - DNA, 1146 bp, Stenotrophomonas maltophilia
atgaagggattcaactctgccgacgtgagcggcaagcagcggctggtatttctggacagcctgcggggactggctgcggcctatgtggtcatctaccacatggcgcttatcccgcaaccacagttgctgctgccgcgctggatcgagacgttcacgttgatgggagggaccggtgtcaccctgttcttcatcgtcagcgccttctcgctctactacaccatgccgctgcgccaggcaggcggagctccattgaaggcgttctatctacaccgctttctgcgtatcgccccgctgttctacttcatgatcgtcgtgaccgttcttcgcgatgcatgggtgttcgacaaccaccattccctgcaaggggtcttggcgtcggtcctgttcgtgttcaacttcttcccgctccgtcaggaaggtatcgtctgggcaggttggaccattggcgtggaaatgatcttctacgccgtgtttccgctgatatatgcccgagtgcggaacctgtattccgcagtcgcgatggtgtttgcgatgctgttgctctggtacctgattctggcggtactcgacctcatggcgttgccggcggggtggcgtgaatcgatcgagcagtggagcgtattccggcatctaccgatcttcgcggtaggtggcctgctctatttctggtatgccaggctggacccggccgacccggagcggcagtccaagggcacgatgatgctcgttgcaggcgtttttactttcctggcactgatccgtgggtggctgcccaatctgctgggaatgccgtattacctgcagggcgtggcctatgggttgatcttcgcgggcctggcgcaggccccttggcaactgctggtgaaccggttcactgcattcctgggcaagatcagctactccctctatctgatgcaccctccggtggtgctcctgctgatgccggtctaccggtggatctacgccggccagcatccggtgaccctttccttcctggcctgcactgtgctgaccttcggcattatgttgcccctggcctggctgggctaccggttcatcgagctgccgggcatccgcctgggcagggcgctggaggaacgctggtggaagcagccggccggtcaggctgcggttgtgagacgatag

SEQ ID NO: 535166 - DNA, 960 bp, Stenotrophomonas maltophilia
atgctgtacgacgcgaacaaatggctggccggccgtccttggctggatctggacaatcctgcgattgatgcctacgtggccaaggtcagcgagcagctggacttcgaccttcgtgagtcgttgaagaactggcatgaaaacggcgtcgtgttgttcaaggacgtggtcaatcgcagcctgattgatgcgttggagaatgacatcgagcacctgcgcaggaattttctcgacttcgatctgaatgtcgaggttcgcggtgtccagaagcacattcgcgatctcacggcggaagagctcgatttttccggcctgaagttcaacagcatccataccatttcccgtgttgcggcagaattgagtctgacccgtcacgtcgcggtctttctccgtcatgtcttcggcgggccggcctgcgcgatgcagtcgctgactttctacaagggcagccagcagccggtgcatatcgattatccctatgtccgctgccaggacccggttgcacaccttgctgcaagctggatcccgcttgaagacatcgatccggcttcaggtcccttggcctactaccccggctcgcaccgcgtggacaagtccggcttcttcgactggggcaacgggtcggtattgttcgagccggacagcgtccgccaaccggatgaactcagcgtctaccttgctgcgcagatgaaggaaaaggcgatcgagccgatcgtgtactgcccgaagaagggagacgtgctggtatggcatggcaatctatcgcatgagggtacccgcatcaccgacgacatgctgacccgcaagtcctacgtgacccattacacctcgctgcaggcctatcctccgcatcacctgaagccgggtgcgccgaagtccggattcatttccgatgcgcacggcgggtacgtcttcgaatactcgtggcagcacgatctcaagcagcttccgagccgcgtctga

SEQ ID NO: 535167 - DNA, 627 bp, Stenotrophomonas maltophilia
atgcacgacggtgcatgcagcctcccgccgctgagcggcgggaaagcgaaaggaaggtcagaatttcagcctgcgtccattgtcgcaattgaactgaatcccatcccccaacaggacgtgatacacgcccggcggcaatgtcgacaggtccatgaggactcggaacccaccccgcctcaacgcaggaacgcccctgtcttcggcaacgtcaggccgtggcgtgttgtaggtgatcggaatcgtccatgtccgtgtgccgccttcctgcttgagaatcaccatcggcgaccgggacagatcacctgctgccgaggcgcccatccagcccccaagcaccacgttccctgggttggccggaacgtaatacggctctgcaccgaaggggtggttgtcgagcgactcgaggttgcacagactgaatggctgactgggctgcgcagcctgcgcggaatcgagttccgttgcgttctgcaggattggaatacccggcagaatgctctcggctgcattcggatcaggaacctggggaccttccggcaccttgcacgaagtaaccagcaaggcgaccgaaacgatacccatgcaccggaggcagagcgattgcattctgttcacgtcggcacctga

SEQ ID NO: 535168 - DNA, 1542 bp, Stenotrophomonas maltophilia
atgaagcgaagcgctctgccgggccagatccttttggcctgttcgaccgttctgttggtatgggcgacctggtacagctggtcgatgccgattgtcgatgcctttgggttccgccaggcgcagacagcactgtctaccgaatggctcgcgcgtggcggatcgttcttcgactacatcacgcctgtcgcgggtgctccgtggtcgatccccttcgagtttccattgttccaggggctttcggcattgatttcggccgcgaccggcctgggtactgatcgtagcggtcggttggtgtctgtgtttttccaggtcgcttcgatctggatggtctaccggatcgtgcttgaggtccgcgccgagcgagcgatggcgacctgtgtggcgggtgcatttgctgtttcaccgctcgcgttgttctgggcccgatcggtcatgatcgagtccacagcggtattcttcggactgctgttcgtgtgggccatctgccgcgtctggcgtggtggtggacatcgctacggtctgctcgccgtcatggctgccgccgtcgctgcgctggtcaaagtgaccaccttctacggattcgcagtgttcgttgcgctggcgttcgcatgggtggtactgcgggagcagggctggcgctacgcgtggatttccgcacatgcgaggctgcttggctggggggcagcctcggcggttgcggcgctggttgtgctgatggcatggctggatcatgccgatgcgatgaagtcccagacaccgctgggtgcatcgctcacatcggccgccctcggcaactggaactacgggacattggcacagcgcctggacccggcggtatggaagaaggtcttcgtggacaagcgtttcgccgacctgttcggctccacctacctgtttctgatcgtggtactgcttggcctggtggtgccgcgcacgcgggtggcggtgggactgcttctggcagcctacatcatcccgttcatgacctttaccaacctccacttcgtccacgattactaccagacggcgaatcaggtctttgcgacttccatcgttggtctgctgctgtggtggcttggggcgtcagtcgctgatcgcaggggcgtcatgctgggcagtgccgcggcgcttggcctgtcggctctcagcatctggtatctgcatggtcatttcctgcccatgatgcagggggccttccagccgtcgcgcttctctgaagtggcccgcgtggtcaaggaaaacacgagcaatgacgatgtgatcatcgttttcggcatggactggtcttcggagatgccctatctcgccagccgccgcgcggtgatggtgcccgactgggcgcccctggagcactatgtgtccatcgccaagcccgacagtgccctgctcggtggcgggcgaatgggagccgtggtggactgccccaaccagctggccgggtcgggtgagcgcgaaggctactaccggcagatcctgaatgagtacgccgagggcgggcgggaactgtctgccgctgattgcagggtcatcgtcccgcgttga

SEQ ID NO: 535169 - DNA, 1587 bp, Stenotrophomonas maltophilia
atgaaaaccctaactcctggcgacgccgcctccctccccacgccgggtgtgcgcccatggcgcggcattaccggcatcctgctgaccgtcctgtcgatcgtggtgcttctggcactgcatggggagttgctgaccaccacgatcaacaagggaatgtgctgcttcgacgactcctcgttcgccgtggtgtccaagaatcttgccagcggcgatggctatctgctgacacttgattacggcaatgtcgatcacagcgggcgcctgttccacccggcgctgggcacgggacccagcacgatcctggtcggtgctgcggccatcaaggtctttggagccaagccgtgggcgccaggcttgatgctggtgctgttcaacgcactcatcctgtccttatgcattgccgtcatatcccgacggctcggcattgcgcgcgcatcgagttatatctgccttgtggcgctggccagcatcgcagtgacaacgcagcatcatgagcagtggttcgcgttcttcggcgaggtccagtcgctggcgctggtgttggccagcttcgtgttgattgcctacgggaatcgttcacgcctggtcctgctgggtgcgggcctgcttctgggcatgtcgttcctggccaaggagctgtccgcattgttcactctaccggtggctttgctgtcattggccctgttgctccggggccccgcgcgcccgtggcgcgtccgtctggcagagtcacttgcaccgctgttgcttgttgctgcaggtacgttgctgccgatcgtgctgttcgaagcctatcgattccacgccatgggtggtcttgatggatggatccagaactggacccagcacatcgacttcgtgaagtcccaaggtatggatgagcggggcttgggcttgtctgctcttgtagcagaacgcctggcactgttctcttcgcgtttcagcatcggcttcatcgcgctttccgtgctggccgtgcttggcatcaccgcaacgttgttcacagcacgcgaccgccggccgaaagagcttgcgctgctggtcggcagtgcctggttgatcatatcctgctactggttgctgctctcgctcggatgggctcggtacgccttcaacgtgattccgctggcattcgcgtgcgctgcgcttcccgtgctgtccatctccggccgggaatcacgccgcgccattcttccgggcggtgtactggcgctcctgttggccatgctggttcagcccatctaccactatgctcgggaaacctggcttccggcagtacatccagcaacgaccgggggattgacggacgcgcagcagcagaaccggcttgaagcgtacctgcgcgattaccatggaaccctgtacatcccgtggtgggcccatggcgcaagcatggagtatcgcctccccggccatgcccggatggcagccattactgcttcttcggacggtgaggggttgctcttgatcgatacgaccctgccgttgccagaaagcagcgactacgcggccttctctcctcgttgcacgctcaaggccgaatttggcgaacgctatcgcgtagagcactgcaccgcaaagcgttga

SEQ ID NO: 535170 - DNA, 426 bp, Stenotrophomonas maltophilia
gtgaaccggccagcagttccacgccagtttctgttgttcctgatcgccggcggcaccgccgcggcgatcaacttcggatcgcgcatcctcttcagccagtacatgcactacgtgccggcgatcgtgctggcctactgcctgggaatgatcaccgctttcacgctcaacaagctcttcgtttttgagcaggccggcaatcgcctgcaccaccagatcctgtggtttgttctgatcaacctggcggccgtcgtacagaccatcctgatcagcctgctgtttgcccggtacgtcttcccgtggttgggtatcgatttccacaacgagacactcgctcacggcatcggtgttgccgttcccgtggtgacgagctatgtcggccataagtacctgtccttcgccaaggcaaaagactcacccgttcgatga

SEQ ID NO: 535171 - DNA, 168 bp, Stenotrophomonas maltophilia
atgcgaatgcgtatggttttgctgcagcgcggcagaaaggccgcacatgcgcctggtgttcacgtcttgcaggcagtcgtgaagaccactgccatgtatgctgtgccgctgtgtcggggtgcctgtgggcaccccaaggacgacttcaaagaacaggagaacaggtag

SEQ ID NO: 535172 - DNA, 714 bp, Stenotrophomonas maltophilia
gtgattcgaaatccattggaggcgacgggacttcatgactcctctctcgattcagtgcaggtgtcgatcttggatagatcctgcctggtacgggctgttggcgtatgcggtgacctcgctgaaggggccttggctgacattggttgccgtaaccttgaatcgttctttctgctgttcgacagccaagagctgtcggacaacgcctggcccgggaacattcaggatggccattttgatggggaagactgtgctggcgtgcttcggctttatctggccggaggcatgctggaggcgggtggcagccctctcaggtcggagctcccttcgctgtctggacattctccacgactcaacgtgtccaaggcccctggaggacgactcgatggagttgctgctgggcggctgagtttcgctgtcttgacggggttgagccattccgtaggcagcaagcagttctcagttcagctgttggtgctgaaggatacagatgtcatttgcttgccagaggtgcctgagcgcgttcccgtgtctgtctgcttcgaaggcgtcaagtcgtgcacggtgaggtttgataaaaccgtaatggagtggaacgagcgtctcggaaatgttgcgagctgcctcgtcgacgaaaggcgaggggtctgctggttatacctgcggaacgggatagttgtgatcgaggcccacgccgcagtgatgttgttcgattag

SEQ ID NO: 535173 - DNA, 381 bp, Stenotrophomonas maltophilia
atgatcgctgcacttgcgccactcaggcggtgccttgatttttcagggcgctccgaccgcatcgaattctggtcgttttccctgctgggccttctggtggcagggctcagctacagcctgatgaacatcggctactggctgatcggcactgatctgttcgattgggagctgtcccggcaacttgggatactgggacaggtgttggcgatcatcgcggtcctcgtcttccttcccccgatgctggcattggccgtgcgtagactgcacgacatcgacgagtccggctggtacgtcgtcattgccttcattccattgggtgtgttcgttctgttccccgtcatgctgcttccgggcagcgaagaagagaatcgattcggctga

SEQ ID NO: 535174 - DNA, 225 bp, Stenotrophomonas maltophilia
atggatctggagcaacaagcccctctgttgagggactgccccgacaggggcggggagaggccggtaaggggaggggcccgaacgttgctcagcaacgtttggggcgaagcgcgcgtagcgcacttcgcgtccccagccagcggcttctgcgaggtacaaccgatcagatgtccccgcatggcggagatccatcgatggatctggagcaacaagcccctctgttga

SEQ ID NO: 535175 - DNA, 372 bp, Stenotrophomonas maltophilia
atgcgcagaatgctgatgccactgaagcgctacgcacagttcaacaggcgttcgggtcgcagcgagtactggtggttccagctgttcctcctgttcgtggcggctgccctgactgggctggcgctcgtcgccggctacaccggatcgcgaatgttcgggctggtatcccgtgcactcggcctgctcgcatggctgacattgctgctgccgcttactgcgctgacggtgcgccggctgcatgacaccggccgctctggctggtggtgtctactttccctggtgcccttcggcggcctggtggtgatcgcgttcctgctgatgccgggcatgccgggcggcaatcgctttggcgcgcctgttccgcacgtgtga

SEQ ID NO: 535176 - DNA, 888 bp, Stenotrophomonas maltophilia
atgcgtggcatgatcctgcacctgcatttcgaatcacgcatggcaccacgcgccattctgtgcggggcgttgactgcggtcttgtccttcattggtacggtatcggccgatgagtgccgattggacgtaccgttgtccggcatgcaggcagcgccttcgtcatctccagggacgcaatggacctactcgggtggagcaggctttccggcaacgccgatgctgctgaaggcagtccagaacggtcagcgtgaactggagatcgcgggtgggcttctacggcgcgaatggactgccacgtatgctgacgtcaatccgttgcggaagggtgagaaagtgctgctgcgcttcccgctcaaggtgggtgaccagtggcaggacaggttcgaggaacccggtgagttcaacgcacgttccggtcgttatcgttacgactacgaagagcagggccagagccgggtaacggccatcgaaaccgtgcgcactgcactgggagatatcagcgcttatcgcatagaacgtgaagcgcgctggcggaagtccaatgcgcgcgcggttgatggggtggacaggcgcaacgcaggtgatggccaggtcgagggcctggagcgcagtatcagttggtactcacccggcgtcgggcgagtcgtgctgcggcgtcatgtcagcggtaatccccagttcgccgcgtatttttccgcagaagatgacaccgatcatctaagcgtcaccgagctgattggattccagcaacccgaggggtgccgggttgagggcgcgccgacccaggcacgcgtggcaggtcaggttttcccgttgcactattcgctggtggacagtgacacgtgggagtttcgtctcatgcgtgatccgcacgtgccggcacgttag

SEQ ID NO: 535177 - DNA, 1008 bp, Stenotrophomonas maltophilia
atgttcatccgcacgatctgcgctctggcgctgctgctgactgcctgcagcgggagcgcccgtgcgcagaccgcagacacagatgcagtgctgttccagaatgatctgcgtgaggtgcttgaatgcagcgcaggcccggatctgcagcagcgcgtcgtcagccgcctgcgcgcggcacgctataccgacgtcgccgaacgcactgcggaactgcgcggatggcgtttcgaggagaagagcgaggatgacgatcagcggatgaccgtcatcattccgccccagccgatgacggtccatggtatcgatgcatcgcagatcattgccgacgcattcggtttctcgattgcgctcgacaccgtgcagcgcgagcgcgtcatcgctgcccatggcctgcggctgcagtcgagcacgttgcgcgagccgttcgcgctctggtctgcgcccacaacctcggtcatcgtgcgcagtgcgggggacggctatcgacaggggtgtgcaccccaggcaacgggcaaggacgccgcggcacgtccggcaatggctgtgcaggacctggaggaagccagcgagtgccgcgccgacgaggccacgatgcgccggctgcaggcgttctggcagggcatctcagagcgcccgcagttccaatggccacaggaggtccgttcggtcacagaggtgagctacaccgtcggtgatgaagagctgcccctgctgctgatcgggctgcagtcgcctttccgcgtccatggcgttgccacgcatacggtcgcgctggcatttggcggcttcttcggtgccgatctcggcgatgccgcgttgaaccctgtgctggccagggccggcatggacgcctcgcacagcattggcaaggcggcctggcagcgcgcattgccgccggtcgcgttcaaggggggcgactggatcccgcagcacattgtcatgcgtaccgacgaggatcacgtcatcgccggttgcgccagcgactacgtgcgcagccgtccgcgctga

SEQ ID NO: 535178 - DNA, 1053 bp, Stenotrophomonas maltophilia
atgcgcctgctcaccgtgcccaggacctccccccatctgatcgtcgtcggtgccggcatgctcggcgcatcgattgcctggcacctggcgagaggtggcgcccgtgtaacggtgctggagcgcgacgagggcgtcgcccgtggcgttactcacggttcgtatggctgggttggcagcagcagcatgctgccgtcggaggatcccgcgcgcttcaggcgggtggtggatgcgctgcccgcgttcgatcagttgcaggtccagctgggtgcgctgccgatggctgcccgcggcgcattgctatgggcaaccgatgaggacgaaacgctgcgctggcacgatgaacttcgagcggcggatcagtcggttgaactactgggtcaggcgcaggtgggagccgttcaacccggcttgcgtgcgccctcggctgccatctggtcgccacgggatttcgcggtggagcctgcatggctggtccggcagttgctgaaggacgcggccgagcacggtgcgcaggtgcgctgcagtcaacaggttctttcactgatgcagcgcggatcgcggatcaccggagtgcgcaccacctgcggagacgtcattgctgacggggtcgtgctggcggcggcgatggacgctgccgtcctgtgcgcgccattgggcatcaccctgccgcttcggcaggctccggccgtactgatggttttcgacgcccctgcagcgatcctgcagcgcctgttgtgcgcagcagacctcgaagtgcggcctggcctgcagggtggcctgcgggttgccgccgatgcgcctgccaacggtgaggccggcctgcccgcgctggtccacacaacccaggccgcgatccgcgcactgttcgtgcaggaggtacccgtagtcgctcgctcggctgcgatgttcaatcgcccgaccacgcgcgatggcgagccggtatgcggtttcctgcagggcgttgacggcctgtacgttgccgtggcccatccgggcatcatcctggcgccgcagctgggccagcaggccgcgaaggtgctcttgcagcgctga

SEQ ID NO: 535179 - DNA, 2316 bp, Stenotrophomonas maltophilia
atggcgtccactaaccagaatctagacgtggtactgcgggtcaacacgacgggcttccgtaccgcaatggcggaggccagtcgcctggcgacgcagaatctcaagacactgcgcgcggaggccgagcggacggccgccgcgcttgcgcgcgtgcatgcggcaccggagggcgcaacgggcaaggccgggacaaaggcaaaggccaacgtcggcggcgatgtgctcggcagcggcttgaaggagctgggcagcggcctgctgacggccgccggtggcccatggggtatcgccatcgcgtcggtgcagaagctgggcgaagcgtacgtggacatggtcaaggcgtccgaacgtgcgcgcgccgagttcaacgaacagatgcagtcgctgaagctgatgtcgttcacgatggatgaagtcggcaagggtctgcgggatcgcagcctgccgatagaagccggtgtcgctgcgctccatgagcaggcaaaggcaatgcgtgagctcgaagcgcagaagcgagcgctggaagggtcagtcacccattgggaagggcgcgtggcctacggccagcagtcggcgcgggaaggcgccggcatgagcgcgggggccgactacgcagggctgaaggccgcgaaggatgccctgcaggatttcgaaggcaagacagatcctgtacggcgccagttcgaggcactgcaggaacagatccgcaactctgtggatccagagctgttcaagcggatccaggatgccgtcaaaaatctcgacaaccaaaccctggcccagttcaaggctgagttggggtcggcacgctgggaggcgctgcaggccggctcagcgatctcggggatgctgggcagcatgcgcggagaagcgtggcgggacgaggtcgagtggatccggctgacccgtggcgaatatgcggcctggatggctgagcgcggtgcggagatcaacgccaacggtggcccggacaagatgaacccggcccagcgcgccgagttcaacagggacgccgcgcgcaagaaggccgacatcgaacgcaaggcccagttccgcgaacagcagcaggccgcccagcagtcggtcaggggcgtgaacgagcaggctgatgcgtacgccgggctgatggatcgcatcgagaagcagatcgcccaggaccgggtgcgccagaagctgaaggaggggatgacagaggcggaaaagctgcaggtcaccctccttgacgagatggagcatgccgagaagaagctcggcgagcagaaacaactgcgggtgaaggcctcgctggacgccgcggtggccctggccaaggaggcggcggccgctgaagcgtcgaagaaggcgcagcaggatctgctgaaactgcagcgggagctccagcaggcggcgaatgcacagcagcgtggcaacgaccaggcactgttcggcatcggccatggcgcggcgagcgtggatcgcatgcaacgccgttccgcactggatgaggaccgggacaatcgaaagcgtgcgctggacgacgagtcacgtggtgaagacggcaaggtcatcgagtcggagcgctacagggcccagctggccgagctcgatgcattccatgaacagtcactgcaacgcgaggccgagttccaggaaaacaagaaggcataccagtccgattggaagaacggcgcgatgcgggcgttcgaggactatgccgatgccgcagccaatgtcgccgagttgagccacggcgtcttcagcaatgcactgggcgggttggaagacagtctggtcaagtttgcccagaccggaaagctgtccttctccgacctcgccgactcgatcatcgccgatctggcgcgcgtggcagccaaacagatggtcagtgggctgatcagttcgatcgggcagatgttcgggccgaagatcaccggcttttccatcggcggctacaccggcccggggggcaagtacgagccggccggcatcgtccacaaaggcgagggcgtgctcagccaggaagacatggccgcgctcggcggcccatcggcattctttgccctgcgcgcttcgctgcgaaccggcaatggcctgtctggtggtgacagcgggggctatgtgcaggtgccgatcgcccacgccggcgagggtgggatgaatgtggaaatcaacaactacggcgaaagccgggtcaatacccgggaagagcggcagcgcatgcccgatggcagcgaagtgcggcgactggtgatcgacatcgtgggcgacagcctcaacggtggtgagctgggcgccattggacgggcccgatacggatggacggaggcagtgggatga

SEQ ID NO: 535180 - DNA, 270 bp, Stenotrophomonas maltophilia
atgcccgcgggattgcagacatgggacgctgccggtcaaccggaaatagacctggctactcgcgttttccgcacgttgcaggtcattcccatcggcgcggggccagggcagatcgaagtcaacgccagcgcccagggcacgatacgtgctttcatcaacgccggtgggttcaccggaagctcaagctccaggagggttgtcacgatcagtggcaaccgggtttcctggtccgccggcgacggcgcctatctttatcttgtggcctggtga

SEQ ID NO: 535181 - DNA, 564 bp, Stenotrophomonas maltophilia
atggcgtacttcgaaacaaccctcgacgatggcaatggcatccagatcagcgatgatttttcgtgcctgcggctggtggattacgagcccaggtggccgcaggtccatctggtcgcgaacagtcatgaccgcagctaccactttgccgatgatcgtgtgattcccgcagacgcccgtgcgggcctgcaggtattcaatggcgccgggcaatgtgcgttctggtccggcttcaagtacgcgcgtgtggtcgagctgatcgagtacacgaactcctacgattggatctatcggatcattccggtacccgccggtcgaaagtatgcggtcgcgttcctggtagcgccctggcaggagctgatcgaaaaccagcgcctgcacggtggatggcaggcgcgctggatgacacgccgtgccggtgtgatctccggtgacagcagtcacctgaagctgggtttcatcgatggcatctggagtgactggtcgatgatgttcgagacgccgcagccgggtcggccggacttccgcgacctggttgcggtggtgctggacgtgaccgggtactga

SEQ ID NO: 535182 - DNA, 456 bp, Stenotrophomonas maltophilia
atgctggtggcattgctgatggtgggctgcaggcaggagcaagcgcccgctgagagcagtagcgccgccgcagcggcggacaatgctcccgccgtcgtaagcggcgggcaggcaaccatggaactcgacgaagcgagtcagggcgagcctgcgcctgcctacgtgccagtcagcagcaaggatctggtcggtacattcgtcgttggcggcgtcgaaacccgtacccttgagctcaaacccggcggccgctacacactgaagggcggcgtggtctgggaccttgtcaagagcaggtggtccctggaagccggcggcacgcacctgcgcctgcaccacgatcaccggcaaacggaagatctgttgtttggcgtggaatcagccgatgtgctggtcctgctcaacgccgatggcagcccaacccacatgcgcagcaccctggatagagtcaagaagtga

SEQ ID NO: 535183 - DNA, 438 bp, Stenotrophomonas maltophilia
gtgcccacgccacttgcccaattgcctccattggagttcatgctgcacttcctggaacctgcggaggacgggccctggaacgagtacatctgtgagctgatcgcaatgcgtgcggtcagcgctttccgtccggccgactggctgcggttgcggcaaatgaccccgcagatgcctctctactggcagctgcgctgcaccgaggtgttgagcatgtgcggactcgccgaggccgaaccgttgctgctggaccagctggattcaccggacgatgaaacacgcatccaggcagcgtgcgcacttcagaacatgagcgtgcgagtgggttcacagcacacccagaccctgcgcgagacattggcccgtacgccgaaatcgcgcccctgcgagcgtgccgacatcaccctgctgctcgagaacgcacgggcggcagccaactga

SEQ ID NO: 535184 - DNA, 495 bp, Stenotrophomonas maltophilia
atggcacatcctcttacccttcccggagcgatccataccgcaatcagcctggtgccgatcctggctggcctgtacggcttcatccgccaccgggaaatcgatcccggcacgcgctcgggcaggatttatctgattggcctggtgctgtcggtggcgacttcgttcaccgtctccagtaccggcggactcaacccaggccacgcattcggcgtgatcgtgctgctggtggcgttaggtggtgttctggcttcgcgactgcgtttccttggacggctggcggcttacctgtcgacctttgcgctgtctttcagcttcctgctgtcgttggtgcccggcgtgaatgaaacgctgacgcggttgccggtggcacacccgctggcggcggcgccgatggcaccggtggtgttgcagaccttgctcggctgcctggcagtgttcgtgatcgggtttgccgggcagtgctggcggatccatcggcgcaccaccccgttgtga

SEQ ID NO: 535185 - DNA, 261 bp, Stenotrophomonas maltophilia
atgtcgatcgacacccagaaggtcattgaagagaacaagcgcagctcggctgacaccggctccccggaagtccaggttgcactgctgaccgcccgcatcgaactgctgaccggccacttcaagacccacaagaaagatcaccacagccgccgcggcctgctgcagatggtcaaccgccgtcgcagcctgctcgactacctgaagaagaaggacgtcgagcgttacaaggccctgatcgagaagcttggcctgcgtcgctaa

SEQ ID NO: 535186 - DNA, 426 bp, Stenotrophomonas maltophilia
atgccccgtttgaacaccgccctggcactgacccttgttttgatgctgctgggcgctatgcctgccgtggccatggcgacagacccgcaggtctccactgaagtgttcgtagagcgcggtgacaaccccaccttcgaactgcagcatgcgcccgccgttgcgtattcaacggccctcgccatactgcccgataccttgccgcagtttcccttgcaggtgctgttggtagctcagctggatgagctgggccacgtgtccaacgtgatggtggcgcggtccagcgggcggcgggagtttgatcgtgcggcgcttgatgcggtggatgagtggcgcttcgatccggtcgtggttgagggcgtcgcgaagcatgcgcgggttcgggtgcgtttgatcttcacgccggcggccgaggcgcctggggcctga

SEQ ID NO: 535187 - DNA, 1137 bp, Stenotrophomonas maltophilia
atgacgaaccacgatcttcttcttgccgctccgcccaagatcatcgacctgtttgcaggcgttggtggccttagtctaggcgcggctcgcgcgggctttgaggtagcggcttgcgtagagctggatgcaattgccatagcatcacacgcccaaaatttcccgaactccaagcacatctcgaccgatgttgcaaccctaagtggcgcccaacttgagaagctctccggcgttccggcagctcaattgacgggattgatcggtggtcctccgtgccagggctttagtttgatagggcgccgccattccggcgatagccgcaatgacttgttcacacatttcttcagacttgttgcggagctgaagcccgcattctatcttgcggaaaatgttcccggaattctatccaagtcaacttcgcaccttatcgattccgccctcaagcagcttccagaaaattacatcaagctgccgccaatgatcattgaagctaatacatttggcgcaccgacctcgcgaaaaagagttttcttcatcggctacgatccagctcttgttgagaattttgaactagatgacctcctccccaaggaagcccataattttctagtccgagatgcgctaaaggggcttccgaaagtatatgcaagttggcagagggaggatcaaagttggcgaaaggtcaagtattccgaatccaaccactttaccgaccgactaaccggacatattccacctggagttggaaatgaaaatgccataaggcagcttgaagaccagattgtatcgggcttctttggcacgcagcattcggacgagacagtttccagattcgatctacttgcgcccggagaaattgatgttgtttacagatctcgccgccttaaaatggatggattgtgtccgaccctaagagcaggcaccgctgcagacaagggcagttaccaagccgtgaggccgatccatccgacggctgcccgcgtaattgcacctcgcgaggcagcacgtcttcaaggattcccagattggtttgtattcaatcccacgaagtggcattctttcagacagattggaaatagcgtcagtccattggttgcggaaggattgctctccgttattcggaaaagaataaaaaactag

SEQ ID NO: 535188 - DNA, 975 bp, Stenotrophomonas maltophilia
gtgagcggctcctccattccttatcacttgaggccaagtaaagcaatcgaccgaaatctgttcatggatctacttacgcgagttggaagattcaagaacatatctgactacagatacataggatttggcggtccgttccttgaagactttaaggccattcatgcttcacttcgcctgacaaagatgatgtcaatcgaatcagatgaaaatgtagggcgtcgacagaacttcaacaagcctctttcttgtgttgagattacccaccagacgagtgctgagcttgttgcggatttcgatttttacgaggattgcatagtctggcttgactatactgagcccgcgaaaattggagagcaacttgctgagctcgaggcgctagttgcgaagttgcagtcaggtagtgtttttaagattactgtaaatgcggctgcggcagctctgggcaattgctcgcctgaggaggatctacaggagtacagggtcagtcgtgcctcccggttgcttggagactatggtccggcggtaatatcaactgaagaggtgacatccaagtactatccgaatctccttctcaaggcgattgaagccgcagccaagaggggggtgataggaagaaagggatacatcgttgttccgttgacctgctttagttattcggacggtcagacaatgctggcggtaagcggcatggtgctgaggaaatctgatgagcccaatttccgtcgtgatactcgacttgatcactgggaatttactgcagccgactggggcgatctgcgggagataagtgtgccagcgatgtcaattaaggagcgaatttttgttgaatcgatgcttcccaactccaatagcgatgaaattgagggggcgatgggatttcatttttccgcaaacagagccgattctagtcggctcctcgccaatttcgcaaaatattatcgaatgtatccctggtactcaaaggttgccgtctag

SEQ ID NO: 535189 - DNA, 1398 bp, Stenotrophomonas maltophilia
atgacgcagattcccgttcacgctgcccctgcaaagcgattctttgtcgaaatgcttacccgagatattgaactcggtgatgcaattcttgatctcctcgataactgtgtcgatggcgcaattcgctcgaacgtagggcgagaaatttcggctgatcaaccttatgaggggtactgggcaaaagtaactttgtctgaagaagagtttattattgaggataattgtggtggcatagatcagcagctcgcttcagattatgcattccgattggggcgcccagatgtcgagcgtgacaaggacattcccaccgtcggtatgtatgggatcggcatgaagcgagccatcttcaaaatgggatatgaatcgaaggtggcgagtcgggtctcggaagatcaggggttcgtggtacatattcctcgatcctggatggaagatgatgcgaattggaatctggagttggatacggatgttgttgatgtaaatgagaacggaacaattatttccgtgagggatctgcgggagggtgtttcgagacagttctctgacgaaaccggatttgtaaagactcttaaagactctgtttcggcatactacggatacataatagccaaaggtttcgccgtctttgtcaacggtgagcccgtccagcctgttcgagtgaacttcttgtctgacgaaaaagggctttcgggcgaggaggctattgcgccatttgtcttcgaatcaagcgtcgagggagtggatgtaagtgtgactgtaggtttgtatgctcccttagggaacaatgaagatgacgatccggctgcgtctaagccgtcggtcgacagggcgggttggaccatcatttgtaatgacagagtagttctttacgcggacaggacgcgcgtgactggctggggtgatgcgaatgttcccgcatatcaccctcaatttgtctctattgctggcgttgttatttttaactcaaaagatgccaagaagcttcctgtcacaacaaccaagcgcggtgtagagggtaactcggatctttatctttccgtcaagaatgttatgagagacgggctgaagcagttcacggactttacaaataagtggaaaagtccttcggaggagcgaaccgctgcaatgcgcggggcaacttcaagctacctggctcaagatatcggcggccatgtagataacgcccagtggaaaaataatcctggagagctcaagggcaagctcttcaagcctaagctaccaaaacccaaagacatcgatcctgtcaaatccattcagttctcaaggcagctcaaggaaatcaatgaggtgcgcgagtactttgatgatcctggaatgagcaactcgcaggtcgggaccaaatgctttgagtatgtgttgcagagggctcgcaagtga

SEQ ID NO: 535190 - DNA, 4770 bp, Stenotrophomonas maltophilia
atgaatcgaatctatcgacgtatctggagtgtggccaagcagtgctgggtggtgggcagtgaattcgccaagacggtgtgcggagcatcgtcgcagcatcgcaagggcgcacagcgcgtggctttgcttgtagccttccagtcgctcacggtggccgctcacgccgctgcagtagcgagccctgactgcggagcggaagaggcgtggcgtgaggggtgcctctacaaggcggcgacggctccgggtgtccgcgcattctcgctgctgagttcgacggcacccttgcttacaggtggtggcgctatagcgatagggcagaatacaaccgggttcgggcacggaattcgcatcaacggcaacaacagttccgcctttggcaactcggtggagacctatggcgtcgacaacgttgccataggctatcaatcgaaggctgtgggtggacacagtgtgggtctgggagcgaaatcaagagcatcaggattcgggtcaacgtcgctgggcaatgattccggcgcaacccgcacgaatgcggtggcactgggtagtggcgcgctcgcgcagaaccagaactcggtggcgctgggagccaacgcaatcaccaacgaagacaatgtcgtctctgtgggcagctccagcgagaagcgccgcatcgtcaatgtccaggatgcgcgtttgaattcgggtagcacagacgcagtcacgggcaagcagttgtatgaagagcgccagaagaccgaatccatgatctatcagacgtccgcggccggaaacatcaggctgggctctggtaatactggaaccgtgcttgatgtacgcaatggcacgggagccaatcgcaaagttaccggcgtagcggatggcaccctgggcacaagcagtaccgacgcggtttccggcaagcagcttcatgccaccaacaccaagttggggactgttgagaagaccgcagatgctgcgaaagtagacgtggcagcggtacgggccatcgcgcaggcggccgcgaatcggatcgacgccgcgactctggccttgggcaagggagctaccgcagagaatggcagcttcggcatcagcaccgcactcggcaacaatgccaaagcgtacaacggccgcagcgtagcgctgggtgatgacgcgcgcgccggcgtggatgcggatgggaacaagggggccaaccagaacgcgggtgtctcggtcggcgccggaacccgtagcgccaacggcgcggttgcaaccggcttccgtgcaaatgcaagcggcaacttctcgattgccgtaggcggtgatgccaaagcccaggctgagcacgctacggcggttggctatctgagcaaggcaggcgccagccaggcaacggcactggggcgtggcagcgaggcaacggcgcagttcgccagcgcgctgggcaatctggccaaggctacgaacaccagttccgtggcgctgggtgaccgcgctcaggtttcacatgagaatgccgttgcgctgggtgcaggtgcagtgacggcgtcggccaattcggtatcggttggcagcgccagcaggaagcggaagatccagtacatcgccgatggtgtggtgggtgccggcagcaccgatgccatcaccggcaaccagcttcatgtcaccaaccaggccgtgaccaaggcccagacagcagctgacggagcgacgaccaccgccaatgccgcaaaggtggaatcgggcaaggcactggccgagacggcggtgctgggtggcctggtcaaccagaccgctgcaaatggcagtgttcgtctgggtgagaagaacagtggcacgcagctggatgtgcgcaacagcgccaatgcgaaccgcaggattatgggcgtcgccgacggggtcatcagcgcgaccagcaacgaggccgtgaccggaaagcagctccatgaaaccaatgcgaacgtgactgcggcacagacggcagccagcgcagcgaaggtcagcgcggacaaggcgctcgctgaagccggtgtgctgagtggacttgtcggtcaagtcgctgtcaacggcaacgttcgtgttggcgagaagaacagcggcaccgtgctcgatgtacgcaacagcgcgaatgcgaatcggaagctgaccggtgtggctgatggcgtggtcaacgccagcagctatgaggccgtcaacggcaggcagctaaatgcgaccaatgacaaggtggcgacggtggagggcattgccaagtctgcgggcacggaagctgcctcggcaaagacggatgcagccaaggcgctggccgagacagcggcgttgggtgggcttgtggcgcaggtatcagcgtctggcaatgtgcgcttgggcgagaagaacagcggtacaacgttggatgtgcgtaatagcgcgaatgccaatcgaaagatcagtggtgtggcagatggctctattgatgccagtagcacagaggccgtgtcgggtcgccagctctacgcgacgaatagtcgaatttcggatttggagagcgccaatcactatgtgagtgtgggtgttgactcattcagtgagcgcgcagaggcggccttgcttggggtggctattggtgattcagcgaaggccggagctgaaggtggcaccgccttgggggcattcgcaacagcgctgggaaagaactcagtggcagttggccgtggagctggagtcgctggcggcgcctcagatggttttgcgatgggggcaggtgctcaggtgcatgcaaacaacggagttgcgatcggagcgggcgcagtggttgggaactctgctgttggctccatggcgttgggtgcagactccgctgcagatgagcctggaaccgcgtcttttggcaatgctacaactcaacgtcgtctcaccaacatcgcccgaggcaccgccgaccacaacgccaccactgtctcccagctcaaggattccctcgccaccctcggcggcggcgcaggcatggatgccagcggcaacatcatcgccccgacctacacggtgcagggcggaacgcagagcaccgtcgaggatgcactgacggcacttgatggcgccgtggtcaccgcaggccgtcgcgcggacaaggtggaaggtcagcttagctcgatcttccaggattcaccttcggcccgtgccgacggcatgagccagatcgcgctgaatggcgtgaatggcatggtgctgaccaatcttgccgatggccgagtggcggcaggaagccgtgatgccgtaacaggcaaccagctgtacgccgcagagcagaagatctcgcagaatcggaatgatctggtcgcgatgcgcaaggagcgggagatggcgcagcaggcaatgcgtgggttggatgcaagcgtcatcgactacggtggcgcgcgtttgactggcgtagccgacggctccatttcagcagatagtcgagacgttgttaccggccgtcagctgtttggtgttgctgaccgggtatcccagatcgaaaatcaaaggcgcttcttcaaagttgatgtcgatcagcaaagtcaggacgccgtggcgggattcttgggagtggcaattggcgactcggcacgtacgcgggaagaaggtggaactgccgttggagccttctcttccgctctcgcgaggaattctgttgctttgggaagaggctctaccgtggaagagcatgcaatggagggtttcgctgtaggagttggggcgcgggttagcgcgcggcatggcattgcaataggtgcgagtagcaatgttggactcaatgcggctggttccgtttctatcggggttgcgtccgaggcgacagaggcgagcactgtgtcattcggcaattcagtcaataaacgccgcctcgtaaacatcgccaacggcaccgccaaccacaacgccgccaccgtcggccagctgcgcggtgcgctctccgcccttggcggcgaggtggatgccaacggcaacgtcgtcggcccgcgcttcactgtccagggccaggcgcagtccacgttgaatggcgcgctggaggcgctggatggcgcggtcgtcaccaacgcctcgcgcgtggataaggttgaaacccagctccgctccgtcttccaggacactccttcggtccgcgccgacggcgtcaaccagctcaccctcgccggtgccaacggcatggttatctccaacgtggccaacggcctgatcgcggccggcagccgtgatgcggtcaacggtggtcagctgcattcgatgcagcagcagctcaatggccgcatggatggcctggagcagcgcatcgacgatgccccggcgccgcgtgcgctggcgtcatcctcggtgccgaagccgcaggccgaggaaacttcggtggtaccggaaggcagggactcccagcaggtcgcctcggtaggcgagggtgacaagcccgcaccacagccgaaggccaacaaggacgactcacccaagccgcaggtggacaccgctgagctggagaagatgctggcccgcgccaacgagtacaccgatggggcgatcagcaatttcgagcgccgcctggacaagatggacaagcgcttcaaccgcatggcggcaatgagcagcgcgcagacggcgatggcgatgaacaccgccggcctggccacctacaaccgccttggtgcgggcgtgggttacagcgagggtgagtcggccatggcggtgggttaccagcgcgtgctcaacgagaagggctcagccaccttcagcctcaatggggcgttcaccaacagcggtgagcgcagcatgggcgtcggtgtgggcatcggctggtaa

SEQ ID NO: 535191 - DNA, 309 bp, Stenotrophomonas maltophilia
atgatccaacgcatcctcgccgccgcgctcagcctgggcctggccagcgctgcccaggcggccgaattcaactgcttcgccagggtcggcccgccctgtgccgcccaggacagcagcaccctgatgggccgcgtcaacgccggcggcctgcggcaggccgaggccgagtactaccggcgcacctcgaccgccaagccagtcagcgctggcggaagggtgatccacgagctgtactgcatgccgcgcgcaccagccgggcatggcgggtctgcaggcccgccaacaccctctggagggcgtactccgtga

SEQ ID NO: 535192 - DNA, 732 bp, Stenotrophomonas maltophilia
atgaacgttgtgcgatcacgctggctgctgctggcgatgggcctgacgctgtgcgcgcaggccgccgccgagcccgtcattgcggtctatcgcggcgaggcgggttgtccgggctgttcggaggcggtcgagcaggccatccaccgttcgcatccggacgatcgcgtggtctttctgggcccggacgaggccgccgatgtcgattcgctcgccgtgtcgcgctaccgcgcctatgtgcagccggggggcgggcaggacatcgatgccgcgatggaggccgtcggagaaggtggagctgcggccatccgccgcttcgtcgacgccggcggaacctacatcggcctgtgcatgggcgcctatctggcgggcgtatcgcatttcggcctgcttgcgcaggacctggacgctgaggcgggaaggccggggttcccggtgaaggatgaggacgatgcggtgattcccgtcacctggaacggggggcggcagacggtgtacttccaggacggcccctatctccacgcggtgccgcgtgatcagggattcaaggtgatttcgcgctatgccaatggcgacatcgccgctgcgtcgtatcgccatgggaagggcgtggtggtgctgtccggcccgcatccggaagcttcggcggagtggttcggagcggcagggatcccgctttcgcagatgccttcgagcgatctgttcaaggatctgctggatgctgaccgaccatga

SEQ ID NO: 535193 - DNA, 984 bp, Stenotrophomonas maltophilia
atgtggattgcatttccgttactgcaaggatccctcttgaacctccccacacgctccgctccgttcttcctgcttgcagccctcgccggcctgtcgggctgcaagccatcgaccgccgtccctgcggcagacctcggcctgggcaagatcaacgcgtatatcgagtgctacaacggcattgaacagcccatccatgccggattccagacgtacacgggctggatgaaggatcctgaggcgggccccaccggcaaggaggcgcagccgcgttcgccgggcaagctgctgtcgcaccgggtcgaatactgcggtcagccgctgaccgatgcattggcgcgggcaccggcgacgtctctggatgagccggtgcggcagtaccagcatgcattccagtcgctgtacacgcagattgagaaggtcgatggttatttcacccgcgaggattatcgccgtgatggcggcgagggcatgcgcgtgcagcatgcgccgctgatgcaggcttacaccacgttcttcaaggccagcgaggtgctggatgccgcgctggagaagaatgaggaagagcgccgggttgaacagctgaagcagatcgaagctgcggaggggcgctcgctggcgtactaccacctgcgcgttattggtgatggcaaacggttggcgttgtcgctgcagggggagtcgccggacctgcaggtggcgcgtatgcagctggccgactaccaggcgatggtcaaggaaatgcagggggccggcgtgggcaaggacaatccccagtgggggcacgtgcagcggtccacggacgtgctgattcgcgatgcgggacgccgcgttgagcgcattgcctccggcaaggcattcaccgatcgtgagcgcgagcaggaacgtgcctccaacggccgcgtcggttctgcacctgcgggatcagaggcggcagtgatggccgcctacaacgacctggtgaccaccagcaaccgcatgcgttga

SEQ ID NO: 535194 - DNA, 492 bp, Stenotrophomonas maltophilia
atgtcctggtatgtccaatgcatgggggccgtgctgttgctggcgtccctgcctgcctccgcccgcggtctgcacgtggacctgatcgattacccccggcccgaggccaactgggagcgtgcctacgggctggaggccgccctggccagggagttcgaccggctctgtgccgatacctggtgcgaaggtgagtacagcaactaccagatcctggagttccgttgcctggtgctggcacatcgcggcagcgtgcagcgatgcagctgggtggtggccgccagcgagctggaggtgcaggccgatacgggtgtggtgcaggtcgacaatggtcgctgggtctgtccggtggagctggggccaggggtacctgtcgaatctttccatgcagcgttggaggcgccggaaggtctgacggcgcccttgccaggcctcgaccgtggtctgttcgacgcgttgcctgattgcatccgcaggccggggagggtggggtga

SEQ ID NO: 535195 - DNA, 1068 bp, Stenotrophomonas maltophilia
atgccgctgcctgagcgtgtcgagcgcggcctggtggtgggcaagttctgcccgctgcacctcggccatgaacgactgatcgacttcgcagccgcacgctgccagcagttgctggtgatcggctggtcgcagccgggttttgccggctacagcgcggcacgtcgcgagcgttggctgcgtgcgcgctttcctcaggcgacggtggcggtgctggatgacgcgcggctggcagccctgtgtgccgaacacggtgtgccgccacgcgtgttgccgcaggacagcgacagcgagcaggtgcagcgtatgttcaccgcatggctgtgccagcggctgttgagtggcccggtgcaggcggtattcaccggcgaggactacggcgatggctttgccgccacgctggcggcctgcttcaacgcgccggtacgtcatgaacggctggagcgcacgcgggatgtcggccaggccagtggtacccagctgcgagccgatccacatgcgcatcggcacagcctttccgccgagatgtatgcggactacgtgcagcgcgtggcgttcatcggtggcgagtccagtggcaagaccacgctcgcgcgggtgctggccgagcgtctgcagaccgcctgggtgccggagtatggccgcacgctatgggagcagcagggcggagaactgacaccggatgatctgcttcgcatcgcaatggcacagccgcagcatgaagatgaggctgcgcggcgggcgcatcgctggttgttctgcgataccacgccgctggtgacgctgggctacagcggctggatgtttgatacggcaccggaggcactgcggcaggctgcactgcggccgtacgacctgttgttcctgtgtgcgccggatattccgtttgaccaggatggcacgcgggtgggggaggccttccgggcgcagcagcatgcgtggtacgtgcacgagttgcaggcacggggagtcgagtatgtgctgctggagggcgacctggaagcgcgcatcgcgagggtgcggcacgagctggccaagcgcacggatagccggttcagtgtgacggcatga

SEQ ID NO: 535196 - DNA, 480 bp, Stenotrophomonas maltophilia
atggttgatcgtcgttaccggaagaagatgctccgctactgggcccgcgaggaaaccaaggcggatgcgatcctggccagggctctggaatcggagtggttcgactactggcatacccaccttgattggaaaggccggggcaatcgccacccgaccgatcgggcggaagtggctggcgcgttgctgcggctgttgcagcgggttgtgtccgtgcgcagggacgatgtccagtgctgggtgacgctggcagcggacacgggcaacagcgcgctgttcatgcattcgcgcaatccgcagggttccgcgtggccacacccattcgagggcacgcgctgggatgccgaaatgccggagtggctcgcgctgctgctgccaggaggcatgcaggccgggtgctggggtaaggatgaacaccaggtgtggatggtgcgggagcgcgcgtcaggaaacgcaaacgatgcgcaggagaggcaggcatga

SEQ ID NO: 535197 - DNA, 546 bp, Stenotrophomonas maltophilia
atggctcatctggataccccgccggcgtccccggcggatgacaatccctatctcgcgcctgctgcagaggtggatggcacgaccgctccgtccgacgcggactatctgaatctcttcgtggggcccaatgcggcgctctaccgccagcgctggcacctggacagcccggtgccgcagccgccgcggccgtggcactggcccgccttcctggtgccgacgtactggctgctgcaccggaagatgtacctggcggccatcctcttcgaactggtcctgttcggcatcgcgctgctgacggcccaggccagcccgctgctcacggtggcgttgctgacggtgccacggttcggcatcgcggtgaccgccaacaccctgtacctgcgccattgcatgcggctgctgggcaaagtgaaggttgcccacgccggccagcacaaccgcattcgtgccgaactgcagcgtcgtggcggcaccagcgtgtgggcggtggtgatcggcatggcggccggcgcggtgatcaacaccgtcgcccgcctgccgggctga

SEQ ID NO: 535198 - DNA, 345 bp, Stenotrophomonas maltophilia
atgaccttgccctccgccttccagtggaccaccagctcgaccagccgcccaggtgaggtgccgaccgtgatcgcgtgcgacggggtgtgggtggtggccatgttccagcgcgtggacgacggcagctgggtggccatccttgaccggcatcggaatggaccaggtggaccgttcaggcgctgcagcagctatgagcaggggcgtgccggcgctgagatgtgggtggccaggcacgaggcccggttgcgcgacgacgtcgaccggatccgccggtaccgggatgcggtgaaggcgaaccggctggccaaggccagcatcgatccgcctttcggctggatggggtaa

SEQ ID NO: 535199 - DNA, 1932 bp, Stenotrophomonas maltophilia
gtgcttgagtcggtaaccgtgaagcgctttaagaatgtgaaggatgcgacactgaaactcagcagggtcaacgtcctggtgggcacgaacaattcaggaaagagcagcttcctccaagcaatcgcctttgccgtcagtgccgcgcagtcagcgctgctgcataaaggacagacgaagggaactctcagcgtgacgttggcaccggagcagctaatttatgcgccgatgaaggacgtaatggcgctcgcgtcgggcggtagccttagacagtcagaagcccacgcaatcgaggtcgactttgtgtcccaccaagctgctgtcacaccggtcgactccgacaattcgtcggcggcgacggatgcagatatggaagatggtggtgaggcagagcagcagagcgagggggaagcaagtgaaacggcaaccgtgatgtgcgacgacacggtccttactgtgttggatgaagcgcagccagcgtccggcgcagacaccggtgatttagatccttcactttctacagacgcatcgtcggcgccgttacccccaccattgcccgcgacaaagattcgggtgaggcgtggcaagaactccaatcttcttatcgacgtgcaaagatctcacggtgacgagactgacttcgccggactgtcaccaccgttttgcatgtacgttccaggtcttgccggcattccggcagttgagccgtataggacgcctgccgcgctgagaaaagctgccgcacgaggtgattccaactcggtgcttcgcaacgttctattagccttatctggggaaggatctgcgtggtcgacgttcgctactaatcttggaattcttttcgaagatcattctatagcaatgaatttcgacccagacaaagacgagtcaatcggggcaaatctagttacacccgatggtgaattaccgctagacgcagcgggaacgggtttccttcaagccgtacaaattcttgcatacgcggcgcgtgacaccccgccccttcttcttctagacgagccagattcacatctccacccggacaagcagcgcgccctcatgggcctgctgcagaccctcgccgagaagggcaaatttcaagtaataattgcgacccattcacggcacatgatcgacgctctcgacgaaaacgagagccttcattggatgagcaaaggagagctgatgcccagcgctcagacagacctggtatccgtattgaccgagctaggtgctttggatcgcggcgatcttctccggaatggatcaatcgatgcagttgttttgagcgaggataggaatcagaaaacgatagccccgctaatggttgcctcgggtttttctagcgatagaatccaaatttggtcctacgtgacgtgtacccagatccaacgtgctcgcctgcttgcagaatttattgcccaacacgctcctgctacccaagtcatcatccacgttgatcgtgattacctatcggatgaggcaatcgaagctaaaaggaagcaattcgatgctgaaaagctgacgctttttgtcaccgacggggtcgatgcagagtctcaataccttaacgctgaacacgtggcttatgtagtgggcaacattagtgtcagtgatgcacaagcactgattgatcaggcgagagttgctgctgaggatgactccctcaaacgattggcgagggagctgatcattagggatacggctgctcatgccggcgaccgccatcatgtgcccgacgtcatggcgttagccgcagaagcacaacgtcttctggcagccgaccccaagcgatggacttatggcaaaaaggcattaggcgtactgacaggcctcctacagcccggtcgcggaaacatcaagttgatgcagtcgtccccatacgtcgtacaccctcagcttgcgggggtagcgagtaagatgacccaaaattga

SEQ ID NO: 535200 - DNA, 186 bp, Stenotrophomonas maltophilia
atgcagaccacaaaccgcaccgcgtgccagcccaacgccagcaatgccaccgcctgccagccagacgcaagcggccagcccggctccaggcgctgcgaccacggcatccaggcggcgccgaagaccagcacgcacaacagcaggcccacccacgccagttgccagaaccctcccgtgggcggatag

SEQ ID NO: 535201 - DNA, 1563 bp, Stenotrophomonas maltophilia
atgccactgctttcttggttcaatcgcgacgcagaccttacacgcgtcgccttggctccttatcggctgctggagccggttgcgaagctttcctatggggaagaggattcccccaacatgctcattgagggagacaacctcgatgcgctcaaggcactgcttccatactacgcaggaagggtcaaatgtatcttcattgatccgccttacaacacgaaaagtgcgtttgagcaatacgacgacaacctggaacactccaagtggttgtcgatgatgtatccccagctggagcttctcaaagagctcttggcgccggatggatcgctttgggtgtcgctagatgacaatgaagctcattacttcaaggtcatcgctgacgaggtctttggacggaaaaacttcattgcaagcatcgcctggcggaagcgtgatggtgcgccgaacgatcgcaagatcggtagtgtccatgatcatgtaatggtatggggtaaagcgaaaggttcgaccggaaaagcgacgctcgcggagttgagctttaacttgatgccccgcaccgataaggcgaactcgcagtatcgggtattcgcagagcctgacggaccggatgatcgcgggccgttccggaagattgacacgacggctaacggcaaaggggggcgatttgttcagagcctgttctatcccgtcacgaacccgcacaccggtgaggaagtctggcctcgaaaaggcacctgttggcggcatagcaaggcagatatggaggctcttcagaaagatcgtcgtctttactggggtgtggatggtcaagctaaaacgcccatgcggaagctattccttgatgaggcaaaacagggcatgacaacgcccaccatttgggaagacactggtctcaatcagcatgcaagtcgtgagatggagctcctctttggtgaaaaggcggcgtttgaaaccccgaagccggaggcccttcttcatcgagtaatccatgttgcaagcaaccccggggacatcgtgctcgatagctttttggggagcgggactacggctgcagttgcgcacaaaatggggcggaactggatcggcgtcgagcttggtgatcacgcacggacgctttgcgttgagcgaatgacgaaagtagttgatggagaaaaaggtggcgtgtccgagctggtcgagtgggagggcggaggggggttccgcttttacaagctcggcgtgcccgtgtttgatgaaaacggacacatccgggaggggattcgctttgagcatctggccgcccatgtttggttcgcggaaacaggaacggcacgatcaacacgtgctccgaaggacgcctttttgggtgagcacagcggagttggctactacctgctcttcaatgggatattgggggacatcaccaagacaggcgggaacgtcctgacccgagccttggtgcgtaagcttcccaagttcgacggccccaaggtgatctacggggaggcaagtgcattggctgaagagcaacttcgcgagcttggtatcacgttcaagcaaaccccctacgacatcaaggcgcgttga

SEQ ID NO: 535202 - DNA, 1392 bp, Stenotrophomonas maltophilia
atgcaatttcaccaacctcgacttcaccactacttgcaacaccccaaaggtcagctctcgattaagagcattcgcattggcaaagtcgaatttctcgacatcttcgtccaggacagagctggcgcgcttcacctccaagacctggttcaagcaacctacgaccacagcgaaaagctccgacgacttcggcggaacggcacgcgctatcccgagccccttcccttggcgacccctgcccgcctcctttcagcagaggttgaggacttcctcaaagacaaagagcgacagaaccttcgcacgactaccattgatgcctatcgtcgcaccttggccatcttgcaacgcgtgagcggtaacacgtccgtcgcccgcatcaaccacacttcgatttacgcaatgtgggacttgctacgatgggcgcccgaagacttcatgacaaaccctaagctccagggcctcaccgtcgagacgctcgttgctaggggccagcgccaagggcgcccgcagcctgccaatgccaccttggagctccatcgccgcttcctggcctctttcttcaataccttagtcaaagcgcgcgccatcccacattcgccgatggatgcgttcaagccagctcgtgaaaacctgctggtcgacaaggacgaacccgaacgcctgctctcagcggcggaggttcagaagatcttcaaccctgagaccttcgtcccctgggccaagaaatacccacaccggtggtggtgcccgctgatagcgctctacaccggggcgcgcatcaacgagatcgcccagcttaaagttagcgacatcgtccaagaccaaggtgtgtggtgcttctcagtccaaaagaccgtggatgaagatctcgcccaaagcactggcaagcgcacccggcagagcctcaagggcaagagtgccgttcgcaaggttccgatccatgactgccttatccaggcgggcttcatggacttcttggcggatatgaaagcgtgtgggcacccacgactcttcccgcatctatccgcaggcacatgccgcaagaccggcgaaccgaacggccgttacagccagggcttcgtgaaccaatttgcggcctacctgaaggggcttggttttggcaaaggaatcgggtcgcatgccttccgtcatacgctcgccaccgagctcgacgccaaaggagtgcgtatcgaacacatcgccttgatcacgggccacgcactcaacaagaaagcgcccgtgctgcaagacaactacgtgcacaagtccgccagcaatgtcaggaggactcaggttgaagcgttggcccactaccagccctctgtgtcacttcctgtctatgtgcgcggacagttcagaggacgactggggaaggaagcaaggatgtatccatga

SEQ ID NO: 535203 - DNA, 618 bp, Stenotrophomonas maltophilia
atgacgcctgcccacgatccgcgccgcgctcagctgcggcgcctgaaggccctcgcgctgggcctgttgctgttgatgctggccggtttcgcaatcagccactggcagggcgagcgcggcatctgggcctgggtctcggccttctgcgaagcagcggccgtgggcgcgctggccgactggttcgctgtggtcgcgctgttccggcggccgatgggcctgccgatcccgcataccgcaatcatcccgcgcagcaaggaacgcatcggcgacagtctcgccctgttcgtgcgcgaccagttcctggagccgggtgtgctgctggccaagctgcaggtgttcgatccagccagccgcctcggcagctggctggccgacccggcgcgctcgcggatgctggccgacatggcccgcggctgggccctgcaggcgctggatttcttcgacgaaaccgccgtacgccgccagctgcacgcctttgtggtgcagcagctgcggcagtggaatgccgccgccaccgccggtgagctgctggccctgctgaccgccgatgggcgccaccagcgcgtgctggacgagggcctgcagcgcctggggcgcggctggagcaaccggaagtga

SEQ ID NO: 535204 - DNA, 1314 bp, Stenotrophomonas maltophilia
atgcactgtcgcatcgccggatccgcgattggtgatccacacctggctcattacctcagtgcgggcgtcgcccactgggtgctccagcacaaaccgctgccagccactcgtgaggttcggtgtggtctgatcgttgttgccctcgccagtggcatcccgagcccggcagcgcgcggtcagcgttgcactaccggtcaccaccttggcaacgatcaccgtacgcagcttgcgaccagtccgcccagtcttcagtggaacccagcgaccgccgttggcgtagacgaacggcgagccggctgcacctgccttgtgcaccatctggattgcgctgccctgctgtccgccgccagagacccaagtcacatcaccgttctgttgattgctgttccccttgacgaatggcgccatatcaccgtcgaacatcgaattgacgttgaggttctcgccccggttgaaggacgcattgagggtgctggacagcacggtcagctggtccgcctgcgctgtcgccttgttctctgcgctcgtgacgcgggtggtcaggccggtcacggcctcagcgtttgcgttcactccctgctgagcgttgtatgcctcggtagcgtcgatgacgaaagcgtcgtcgtagatcacgttgccgctggcgacgccaccacggattgtggcgcggacgatgaaactccaaacgtcgtcacccaccggcacgtagccagacaacttggtccactccgcacctacgttttgcgcaggcatcacctggacgttcggatatcccacggtgccattgttgcggcgtacggtggcctgcagcccgacggtgccatcaccggatccgatgaccagcggattcgcgggatcgttgcggacccagacttccgcgtagaacactcggttgccgttcgtacggaactcgatcagggacacatctcggatcgcgccggtggcggtgaggatcatggccttggtcccggaacgcgcgaacgcgtccgtgatacgtcctgcgccgaaggcgtcaccagccttgcgggtttcgaagcttccgtcttggatcaggttcgcaccgctgaggatcgacgtagacagatcgctctgcagcttggtgacattggtcgaagtcgagtcgatcttcccctcggcggtagtcactcgggtggtcaggttctgcaacgccgatgcattggcgtcggtcttgccggaaacgttggtgaggtcgctgcgaagcgaagtcagctgcgccgcctgggacgtgatcgtctcgccctgctgggtcaccttcgtgctgaggtccgagattgcctgcgcgtttgccagtag

SEQ ID NO: 535205 - DNA, 807 bp, Stenotrophomonas maltophilia
atggttggcgggccgcagccagccgtccacgagcgtcggcgcgccgttgcccgtccacccttcaatggtctgattgaacggccagagcttgatgctgtcgaactgcgtcccgctgccggccgcgacctccgacaccgcgcgcgccagcgattcgtccgcgctctgccgcagctgttcctcgcgggtgatcgccgcctcgcgcgccatcttctcgttcaggatggcgtcgattcgcgcctgggcctccgcactgatcgcctgcatggcctcggtcacgccctgctgccgcagcagcgcctcggccaccaggtcctgcgccgcctgtgccagcccggcggcgcgggccgccgcctcgtctgcgatcgcttggatgcgagcactgatctccgccgccagcttcgcctgctgctcagccaggtccttggaggtggtgggcggaacaacgcccaccacggttcccgtgcctgtcttgccgcgcacggtcggggtgatctggaaccaccaggtcttgccgctgccgtcgctgtagacgtaccgcgtctcggtggtgcggtggatctccgtccaaggaccgtcctggctctcgctgcgcgagatgacgtagatcacaccctccagatcgacggcgtcccattcgagcacgacgccatcggccaccggcgtgggattgaccccgttcgccggcggcacgtccggcgccttgaagggcaccgggaaccacgtggaaaagcgcggtgccaccggagacgcggacggcagcccgcccacgccgatttccaccagcgtgagtttcctagcttgcattga

SEQ ID NO: 535206 - DNA, 477 bp, Stenotrophomonas maltophilia
gtgaaccgcttagccatcgcaggagctgccttcgtcctgtggtccggtgccatggtcggcgttggctggacctggcgcagtgatcgggcagagggcagggaggccacccagcgcgccgccgacgccgaggcggtcgccacgcagatcaatcagacccgtgccaccgagcatgcccaggccgagacactggccaccattggagcgaagcatgaacaagaccgcactgcggccgcgaccgtccctgctgctgttgtggctgacctgcgcgctggtcgtctccagttgcgcgacgacctcgccacctgcagtaccagcctcctgtcccaagccatcgccggcgccgtcgaacgtgatgcgcacgccgaactacgagcagaggttgcgggagctgctgttcaaatcggccgggacgccgacgaccacgtccgcgccagccaagaagtgatcgtggctgaccggcaaccggtgacgcaatga

SEQ ID NO: 535207 - DNA, 300 bp, Stenotrophomonas maltophilia
atgacgtccataggctcaggaggagtcgtcatcgcggactggactccatcacgtcgttacaccaaagagtacaagaagctaacgatcgacatgcagacgcgtgtagatggaaagcttgacgatctgcagaagaacccaaggccaccaggattggggttcgagaagttgcaagggttcaagaaccctgacatctacaccttgcatgtcaccggcaactacaagatttcgtttgagatcaatggcacaaccgcttggctcaggcgcgtggcaacccacaatgagattgaccgagcaccataa

SEQ ID NO: 535208 - DNA, 516 bp, Stenotrophomonas maltophilia
atgatggccgcgtccctaaagaaggacatgacgatcgccgatgcggtcgtgtccttcaccgatactgttgaaggactagcagaccttggcctccaccgcgcagttgacgagactgtcgacgctatcgccgcgcacgtgaagacgtattacggaattgcaaacgttggccgcgccgtggtccaggtgacccgtactgctaccgttcgtattggccagtacatggaccccgacgacaagttggttgacgggctgggtgagctcgtcccgcgttttgagtctgggctagccgtgcttactgcgaagaagagctgcattgacactgatggccgcttgaacgaaagccattgcgacatgttgcacacgtcgtatgacgacatgctggttgcgttggctgctgtgatcgaggtcacgaaggacctgcaggcggcaatcatctcgcatgatcttgctgcggagccccgtgacggagtccgctactcgacggttgaagagctgaggcgaggcattcttcattaa

SEQ ID NO: 535209 - DNA, 243 bp, Stenotrophomonas maltophilia
atgcgccacctggccctgcccttcttctgcgccgtcgtcgtcggcctgctcctcgcgctgctcgcttgggcgctgcgcaaccaggtcgacaccgtcgccctcgcctgcgccatcggcgccgtgttcttcgcatggcgctgctgggaagacctcaacaccacctggccggctctaaaggtcgagccgcagcgccgccgcgatgagcggcagcgcgcgccgctcgccactgacgacacccagtga

SEQ ID NO: 535210 - DNA, 861 bp, Stenotrophomonas maltophilia
atgagcaacgacaacaagaccctggcggacgtgcagcccggtgggagggtgaggctgggggatgggccgaccatcgagaagcaggcgagggatctgctggcgaaggagtgggagatgttgagcttcgacgctccagtagaagagctgcgggagggctgtgaactgcctcccgtggtcgcggccagtgttcgcgccatcgttgccgcgctctctgcccattcattccccgatggccagcgggacaacagcgatctgctggcagcgctacgggacgtcgaggaatacctctattacgcaggctccaactcgagccataccgagaccgtgcgcgcggccatcaacgccctctccgcccagccctccccgggtggtcagggggatgcgctggaagctgcgcgcgagttactggccgccgagtatgacaaggccggcgaaagggtatttgctgatcgcgctcgcaagggtcgctatgacaatgacccggacatgcgcgcaatcatcgccgccctcgccgcccgccaaccggtgggggagccggttggctatgccacgtaccgcgatggccgctttggcagctggctgttccagacccgtgcaatggccgagtctcacgacagcaccgcagttgcaggcagtcccgcgaactctgaaatcgtgccgctgttccgttcgcccgcgccagccgtggacctgggcgacttcaaggccctgtatcgcgcctacgtccgcctgctggaatctggccgggatcgaatcagggatcttggcggcgcctgcgatccggtcgatgtgatggaagccaacgacgtagacctgcaggctgcgcggcgcgtcatcgacagcaaggcggtgggcaaatga

SEQ ID NO: 535211 - DNA, 243 bp, Stenotrophomonas maltophilia
atgaagttcgaggtctttcgggaaggtggtctcaatctgcttgcacagacatctggcgattggcgttggcggctccgtgctgataacggccgaataatcgctacgagtggtgaggggtatcggaacagggacgactgccttcatggcatcgagctggtcacgtccacttccgtggcgacaatcgtctatgacgaatcgcaaggtcgggtgctgggcagaaccatcttgggtggctggtcctaa

SEQ ID NO: 535212 - DNA, 705 bp, Stenotrophomonas maltophilia
atgagctccagctctagtgatttccaggacttcgttggccatcttcgcgccgagacgttaggcggtgctctagagccgaagcctcggcaggcggtgatcagaagagcccatgcgcaatatctagcgctaattgctttgacaggtgagcttgtccatggtcatgccggcattgcgctggagtatggggatgccggtgttagctatttgaaggaggtggtgtcggattgctcagaatttatgatctgcaatgcggtcggcctgcatagagctgctggcggagttttaaggtctgcaattgaatcgtatctaaaggcgtttgcagtcgctgaagttccgactatcctgtgcaggacatctgtgccggaagttttcagtgatgcttctttagcggagttctttaaaggtagcgtcggtccggacttggtcgcacagttaaaggttgtttataaatctttaaacctttatgtacatactgtagatgatcggcatatgtttggagccgaggcgattggtgtatacccggtttggtccgataagtcagaggctctcgtcgaaaagtttgtagctgtggttaggcttttcctgtacggggccgtcgctcggaggcgtgatctgtacgatcagttcgatcatagaaacaaagttcttatcaatcgggcaatgaccagaccgcaacgtcgtaaggccttgggtgttgacgactga

SEQ ID NO: 535213 - DNA, 528 bp, Stenotrophomonas maltophilia
atggctacaaagaaagctggtggatcagagtctgatgtggcattaaaggcccttgatctgctgcaggaattaatctggtcgattggctcccgagactcaagggagttgatgacgggtgtgtctcacctacgtggtcttgcgaagtctgagaaaatggagcagcgtaaggcggaggctaagtcgacttcgaaagatcggcgcaaggatctaaaggcgctggtgggttcgttatcgctggttctagctgacactgagcttttcccctcgaacgaagatatcgccaaatttgccgaagaggcgctgcatatctctatcaatcgatgggataagcggtcccggtacgagatgatcggaatgctggtcaccgaatcgattaacgcgagcccaaagttgcttacgcaggtgggaaggcttctcgccaaaattagtgacgaatcagactcaatggaaaagatcaagaaaagctccagggaaactggtttttcctggaatgaagctatcagatcactctcaacttcagtcgaatga

SEQ ID NO: 535214 - DNA, 726 bp, Stenotrophomonas maltophilia
atgcttgatgttgatccgcagttcaatggcacacagtgcctgatgacgccagctgactatgttgaacataggagggaaagcaaagacaccatgcttgacctgttcgaccgcaagcgcgtcaaggcatccactgtgaagggcgcatctgaagtgcagccgaaaaccttcgcagaaattgatcttgttgaagtgcgcgacaatttctatctgctcccgggaagtctcgatctgtatcgcttggagatggcgcctggcgagggacgtgagaacaggctcaaagcattcctggccgctctagatgaggagggtgagtacgattacgtcatcattgacacgcccccaactccatcggtttggatgacgagcgcactgatcgcgagcgattactacctaattcccgttaagccagatccgctatcactgactggcctcgaccttctcaagagcattgtggaggatcgtaaggagaactacggactttcggtgcagtgtgcaggtgtagtgctgaccatgacgcggagcgggactaatgtcctggctgatgcgcagaggtatctgagtggcgacatttactggaaagatcgcgtgttcaataccgtcgttccgactcgcgttaaatatgcccagcaacagcttaatagtgtgttcatgcttgactctgatgccgatggaattggtcaagcgataattaacgttaccaacgaattgttggtaaggatttcataa

SEQ ID NO: 535215 - DNA, 402 bp, Stenotrophomonas maltophilia
atgttcagtcacattaccgtcggtaccaacgatcttgatacagcggccattttctacgatgccctgctgactccgctcggcatgcgccgccgcccggtcacgcccgatggtggcccggccgcggcatgctgggtgacggcgcacgctgcgctgccgcgcttctacgtctacgcgccctatgaccgtgagccggctagccatggaaacggcagcatggtggcgttcctcgcgccctccgcggacgcggtggatgccgcccatgcggcaggcctcgctgccggcggcaccgacgagggcgcaccagggttgcggccgcactacggagctggctactacggcgcgtatctgcgcgatccagatggcaacaaatgccacatcgtccatcgtggagacctggcctag

SEQ ID NO: 535216 - DNA, 1143 bp, Stenotrophomonas maltophilia
atgcacctcggcagatttcatgcggttgttttcgatctagtgcatcacttcaaatcagcgggcaccactgaagccttgcaagacgcatcctcaagcatggccgagtatgcaaactcccgaaatgaagatgctctaaatcgcttcaagcaggctgtacagaaggcaaaaacaagtgcaagcattgaagacaaagacctccttcagccctttgcacagcaagcaatctccgagatgggcctctctggactttttaatcctgaatttaccaaggcattggatacggtcgttagtggcgcaggctttgaccctcatggtctttcagaaagcatcagcaaattctccgaatccatctcaagcaagatttccctacttcgtcaaatggaggcatccttcgaaaagcttgaagtagaatttgagcgcgtagaaggaggcgaggcggagattggcttcatactacctcgcgaagtcgttggaacgaaacttggagaactcagtcgcgagtttgatcatctaaataaacttagcagagccatcgccgaaataagtggcgactcacaagaatacgaacccacagtcagaactattgcctcctcatggtggcagctcttcttagaccttacccctgagcaaattggaatctgggtactcgccattgaacgaatactcaacctattcaagacaaaccttgagataaaatcactatcaaatcaactaaaagagagacatctccccgatagcattacatcgctcattgagtcagaagttgacaagagagtaaaagctgaaatcaagaagatatcagcggacattaagaagcagaactcaaaaggcaaggatccagcccgacttaatgaactggagacgcagctgcgacagggactgtcacatcttgcaaaacgccttaatcaaggaatgcagattgagataaatctatcaattcccgaagaacccaaagagcccgaagctgcagagggcaaagaaattgacgccgccattctcaaggccatagaggccaaaaaacttgaaatagccaaacttaatcaactgcgtgagcgagccatggcagtttctgtagagtctgaatatcttggcgaagatgcaccgctactcattgagtctgatggcgaggagcaggaaaaataa

SEQ ID NO: 535217 - DNA, 228 bp, Stenotrophomonas maltophilia
atgaagggggtgcgtcccgatttcatcgctcttttgggaagtgtggttgagtaccgcaatggaatggcgcatgaatttttggcaaacggagtgatttcgagatcgattgcgaactttagtgatcgtatgctctatggcgatctgttcaaggggctctatgagattgaacagatactcgttctatatgattggtgtgaagaaaacgatggctggatgcctagggcctag

SEQ ID NO: 535218 - DNA, 573 bp, Stenotrophomonas maltophilia
atgtacatcgcggaccttgttcactttcatgacgactcagagcgcgactactacgcggtcttgggccgatacatcagtgcgtgggcccggttcgagtatggcctttaccaactgctcctggccgcagggggcacataccggagggttctcgagttcaaaggggagacctcactcccaccagaaatcaaggccggattcatgccctttgggacgaaaatcggcaacctgaagaagtgtctaaatgcctgcccgagcctatggcagccacaggatcgggtgcttgacctcatcgcctgggcggaacgggaggcgcgcgcgcgccaccatctcattcatggggtcgaccaaattttccagcgacgaaccccgttcaatacctacatgtacaaatgggagtcgtcggatctgtcgtcaagcaacatcgctgatggaatggacttcagcatcgaatccttggccgcgagatacgatgaggtgggagacgcgtgtatgaacgtgggcatccttctcgtggaagtgacggacacgattaagcggttgatgccgagctggcaagttgaagacagcgcctaa

SEQ ID NO: 535219 - DNA, 444 bp, Stenotrophomonas maltophilia
atgagcaacgacaacaagaccctggccgccgcgctccccgatatcgaatcatggtctaagggatacaagtccggttatgcacgagcagtagctgacctcgccgcccgtcagccggtgggggagccggtgggctattccacgttccgcgatgggcgctttggcagctggctgttccagacccgtgcaatggccgagtcgcacgacagcaccgcagttgcaggcggtcccgcgaactctgaaatcgtgccgctgtttcgctcacccgcgcaggccgtggacctggggcagttccgtgcccaggttgccgcattactgcgcagggagttcgatctggaagtcgcagatccgggagaccaccggcacgacgacggcgcggaagaagccgaccggattgccggctccatcgctgccctgatcgacagccaggcggtgggctatgcgtag

SEQ ID NO: 535220 - DNA, 786 bp, Stenotrophomonas maltophilia
atgcgtagctcaatcgcgaggactctgcccgagcaaatcgcgcaaccacccgcgaatagcgcgccgacaatcgtgcaaccatttccaacgttctcgccgccttttacgtgtagccgcaggaaattcggtcaccgtctccagaagtgtatcggcaaaagcaatgtcttccaaagagtcgttcatagtgtcacggaacaggggattcatagtctcccagttcctgttctccgcgctactactgttcatgcgctgcccgatctgcactacttctttcgcagattgcaccgcatgagcaacggccaaaatcagatcaaggtctactgccggccatttcgagccatccacctcgcggtcggcaaggcaacggagctttgcagcagactcttcgaagcgctgacgctcctctgccgaattcttcaactcggcttcgacaagcgtcgcgtcgtctgtctgggcagcaatcgggtaacgctcgatcaggccatcgaggaagatcttggccttcaaagtgtcgctgtagtaggtagccgcaaacacggcattggctttctttctaaggatgaatctacgctggatagctgggccaaaaatggcggtgaaaactgcaagtatcgtgcccactgccgcccacgcatcccaccaaacgacgcagtctccaacgcctggctccatgcatgggctgattccattccacaactgctcccaactagacattccctgatccccctgtggattcgccggcattctgacatgccgctgcagcgggcggagcacgcccatggctga

SEQ ID NO: 535221 - DNA, 918 bp, Stenotrophomonas maltophilia
atggcaatcagagtcttcataagtcattcggccaaagatgaagccctagcatcggccgttgtcgattttttgcttgcaaacttcgtgcttgctgacgaagagatccgctgcacctctgtgccggggcataagttgccagtcggcagcgactctgcgtccacgctcagagataacctgggtgaaagcgccgtggttgttgggttgatcacgaagagtgctctctcgtcaggttgggtcttgtttgaattgggcgcggcatggggctcgaaaaaacacttgatgcccctcattgctggggacgtcgactttaaagacctccccgggccattgagcgggcagcatgttgcaaagctctcaagtaaagaagatttgagccagttcgtcgatgagattgcgaaggtgctgggtgcgcagaggagagcggcagctaaatctgcgggcgcacttgattccatactcgcctctcatgaaatccatgttaagaactcgacggctgagcccgcgaaagttcgcgttgaggcaaaagcgaaggagcctcagttttcggggatgccattctccgagctcatgggcatcctgaataaagaaattatcaatattccggctgaattgtcaggtcagaagtcagccagtgaacagtcagtcttttcgctgttcgtcgccaattctcgccagttcgccactggcgtgcaaagtaactacgacgaagggacggctggagatttcatgtatcgtgaaatcggtttgaggcttctcccgtatggtcttgtgcagtttgaaaagttgccagcggcacaggcgaagtttttcaagcgtctggttgtgagtgctgaaggtaataaattccttcttcactggaatcgcatatcggctgctaatagtgctaaaaagtccacgactcccagtagtggtggttaa

SEQ ID NO: 535222 - DNA, 516 bp, Stenotrophomonas maltophilia
atggtattcatcatgaacggatctgcggcattcctggcggacgcgctggtgatcggcgttggcgccaccgccgtgctggacctgtggtcggtgctgcaacgccgggtgttcggcattcccacgctggacttcgggatggtcggccgctggctcggccatctgccacgcgggcgcttccgccacgaggcgattggccgggccgcgccggtaaagggggagcatgtgctgggttggtcggcgcactatctgatcggcgtgatcttcgcggcggcactgctcgcgttcgtcggcgatggctgggtgcggtcgccaacgccgttgccggcactgttgttcggcattctgagcattgtcgcgccgttcttcatcatgcagcccggcatgggcgcaggcattgccgcgtccaggacgccggcaccggtcaaggctcgcctgcgcagcctgctcgcacattcggtgttcgggctgggcatgtacctttcggcatgcctgtgggccatggccaggtccggatga

SEQ ID NO: 535223 - DNA, 672 bp, Stenotrophomonas maltophilia
gtggcgggtcgcgcaaggcagatcgtgggattggcagggcgggtgggccatgcaggggacgctgcaagtacgtccatgcaagctcggtcgccgcatccatgcggctcacgcccctgcacgacccacccgccctgccttcgacagtttcctgcggcggtccgccacggaagaaagaaaagaagagcaaaagcgggtcgcgcgctacgcgtgctcacaaacaaaaaggacgcggcgaaggccgcgtcctttttgttttccattagttcgtcagtaacccaatgctgttgcccaccgtcaccgggaaactgtcgaaggcgggacgggtgcagatggcgggaccgtccacggcatggatgccgtggccgagcccccagggatgggttcacggcgtgtcccgccatctgtacccgtcccgccaaacccacagtaacccagagccgctttggctttggctttggctttggctttggctttggccgttgctttcagcttctgcccgccgcaggcggaccaccgcgcgtcagcgcggcgcctccacatccaacccgatcgggcagctcacgccagtgccaccaatcccgcagtaaccgttcgggttcttcgccaggtactgctggtggtaatcctcggcgtagtaatactcaggcgccggatacacgatctcggtggtga

SEQ ID NO: 535224 - DNA, 576 bp, Stenotrophomonas maltophilia
atgaacctgcccaccctgaactggcgcaccgtgctcggcatcggcctgctgctggccgccctgctgagcagttgggcggcgctgcgcaaccgcgacaaggggccagccaagggtggccaggaagtcggcgtggattacatcctgcatgacttccagatcgtcgccctggatgagcacggcaaggaatcgaccaccctgcgtgcgccgctgctggagcgccagcgcggtgaccagagcatcaacatcgccacgccgctgttcgagatgccggacaaggatggcaagcactggaccctgcgtgccgagaccggctggctcagtgccaagggcgacgagatgaagctgcgcggcaatgtcgccggcgacagcccggccggcccgggcacggtgccgaccaccttccgcaccgatcatctggacgtgttcccgaaggaaaaccgcgcccgcaccgacgccctggtgaccatgacccgcccgggcatggaacagtccggcgtcggcttcgaagtggattcgaagaacaacacgtatcatttcctcagccagtccaagggccgctacacgcccaagcactga

SEQ ID NO: 535225 - DNA, 549 bp, Stenotrophomonas maltophilia
atgccctggtcccccctgcccgccttccccgcccacctgcatgccgccgcggcccgtatccgcctggcctgcttcgacgtggacggcaccctcaccgacggtcggctgtactacgacaaggacggcaacgagagcaaggcgtacttcgtgcaggatggcctgggcctgaaactgctgcagcagcacggtatccaccccgtgctgatcaccgcgcgcaacagccagtccgcgctcaagcgcggcgccgacctcggcatcgacacccagatcgccgtgggcgacaagctggccagcgtgcaggcgctgtgcgcgcagcacggcatcggcctggaacaggtggcgttcatgggcgatgacctgcccgacctggcgccactgggtgcggtcggcctggcggtggccccggccaacgcccatccgtggatcgccgagcgcgtgcactggcagacccgtgccgagggcgggctgggcgccgcacgtgagctgtgcgacatcctgctggccgcccagggccacgtggacgccgtgctggcgaggttcggcgcatga

SEQ ID NO: 535226 - DNA, 1002 bp, Stenotrophomonas maltophilia
atggccgaatccctgttgcccccccgttccgtcgaccctgccggcctggtcgccagcggccgccgcgtcttcgagatcgagcggcaggcgctggatgccgtggccgaccgccttggcgaggccttccagcaggcctgccaggcgatcctggccagccgcgggcgggtggtcgccaccggcatgggcaaatccgggcatatcgcccgcaagatcgccgccaccctggcctccacgggtacgcccgcgttctacgtgcacccgggcgaagccggccatggcgacctgggcatgatcaccgaagacgacgtggtgctggccctgtcctattcgggcgagtcggacgaggtgctgatgctgctgccggtactcaagcgccagggcaacgtgctgatttccatgaccggccgcccgcagtccagcctcgctaccgccgccgacatccatctggatgtgagtgtgccggccgaggcctgcccgctggcgctggcgccgacctccagtaccaccgcctcgctggcgatgggcgatgcgctggctgtggccctgctcgacgcacgcggcttcaccgccgatgacttcgcccgctcgcacccggccggcagcctcggccgccgcctgttgctgcacatcaccgacgtgatgcacaccggcgaggacctgcccagcgtgggcgccgacgccagcctcagcgaagcgctgatggaaatgagccgcaaacggttgggcatgaccgccgtggtcgatgccgacggcgtgctgatcggcctgttcaccgacggtgacctgcgccgtgcgctggacagcgcgctggacgtgcgcaccgcaaagatcgccgatgtgatgacccgcaacccgcgcaccatcggtgctgaccagctcgcggtcgaggcggcccggcagatggaaacccagaaaatcaatggcctgatcgtggtcgatggccagggccgcgcggtcggcgccctgaacattcatgacctgttgcgggcccgggtggtttaa

SEQ ID NO: 535227 - DNA, 231 bp, Stenotrophomonas maltophilia
ttggacgccgacaccatccgcaatctgatcgaaaccggcctgcctggcgcccgcgccgacgtgcagggcgacgatggcgtgcatttcgaagcgaccgtggtctgcgaggccttcgccggcaagatgccgctggcccgccaccgcatggtgtatgccacgctgggcgacctgatgggcggcgcgatccacgcgctggcgctgaaaaccgtgaccccggccgaagccggctga

SEQ ID NO: 535228 - DNA, 1272 bp, Stenotrophomonas maltophilia
atggccaagatcgttgtgaccggcggcgctgcgctgcacggtgaagtgagcatctccggcgccaagaacgccgtcctccccattctctgcgcgaccctgctggccgatgcgccggtggagatcaccaacgtgccgcacctgcacgacgtggtcaccacggtgaagctgctgggcgagctgggcgccaaggtcaccatcgaccagggcacgctgtcgcgcggcagcgcgatcgtggtcgacccgcgctcggtcaaccagcacgtggcaccctacgagctggtcaagaccatgcgcgcttcgatcctggtgctgggcccgctgctggcccgcttcggcgcggccgaagtgtcgctgcccggcggctgcgcgatcggttcgcgtccggttgaccagcacatcaagggcctgcaggcgctgggtgccgagatcgtggtcgagaacggcttcatcaaggccaccgccaagcgcctgaagggcggccatttcaccttcgacatggtcagcgtcaccggcaccgagaacgtgctgatgggtgcggtgctggctgaaggcaccaccatcctcgacaactgcgcgatggaaccggaagtgaccgatctggcgcactgcctgatcgcgctgggcgcgaagatcgaaggcctgggcaccgcccgcctggtgatcgaaggcgtcgagcgcctgtccggtggccgccatgaagtgctgcccgaccgcatcgagaccggcaccttcctggtcgccgcagcgatgaccggtggcaaggtcacggtcaaccgtgcgcgcccgaacaccatggacgcggtgctgtccaagctggtcgaggccggtgcgaagatcgagaccaccgacgacaccatcaccctggacatgcagggcaagcggccgaaggcggtcaacctgaccaccgcgccgtacccggcatttccgaccgacatgcaggcgcagttcatggcgctcaactgcgtggccgacggcgtgggcgtgatcaacgaaacgatcttcgagaaccgtttcatgcacgtcaacgaactgctgcgcctgggcgcggacattcaggtcgaaggccacaccgccatcgtgcgtggcagcgagcacctgagcggtgcaccggtgatggccaccgacctgcgtgcgtcggcgtcgctgatcctggccggcctgatggccagcggcgacaccaccatcgaccgcatctaccaccttgaccgtggctacgagaacatcgaagagaagctgtcttcgctcggtgctaccatccggcgcgtgccatga

SEQ ID NO: 535229 - DNA, 327 bp, Stenotrophomonas maltophilia
atgatcctgcgcgggaaattcagcccgcgtcgcaaggcgctgctggccctggtgctgatcgtgctggcgtggctgggctatgcctggtacgccaacatcgccatcacccggggcatcgagcagaaggacatggactggaacggcgacggtacggtctcgcgtgatgaaatcatcgagtcgttctatgcggtcgcagtgaacgacagccaggacggcaaccgtcattgccgcactttcgtctggcgcagcaccggtgagcagatccgcgtggactgccgcaccgagttcaaggcggccgaagacaaaccggccgaagcgaagaaataa

SEQ ID NO: 535230 - DNA, 684 bp, Stenotrophomonas maltophilia
atgaacaccctgacccgccccctcacctggatcgcagccgctgccctgaccgtggccagcctgccggccatggccctggaaccgttcaaggcggattacctggccagctacatgggcatgcaggccaacggcaccatgaccctggccagcgaaggcagcaacaagtggcgctacagcctgcaggtgaagaaccagctggccgacctcagccagagcacggtgttcgaggaagtccgtggccagctgcgcccgctcagcagccaggaccgttcggcgctgctggtgaagaagcgcaacgtgcaggccaactacaactggaccagcaaccaggccacctggaccggcgacatcaagccggaccgtgcgggccccatcgcgctgaaggcgggcgacatggacgcgctgctgatcaacctggcgatcgcccgtgacctggccgccggcaagccgctgacctatcgcatggtcgacgaaggccgcatcaagaacatgacgtaccgcgtgatcggcaaggagtcgatcaccgtgggcggcaagagctacgaggccaccaaggtctcgcgcgccgacggcaacaaggaactgatcgcgtggatcgtgccggagtttccggtgccggcgcgcatgctgcagcgtgagagcggccgcgatgcgctggacctgaccatcaaggcgatgaactga

SEQ ID NO: 535231 - DNA, 825 bp, Stenotrophomonas maltophilia
atgaagaccacgaccctgctgtccacttcattgctgctgtcgcttgccgtgttccccggcgtgggctggggacaggcaccggcgcccgccaccccgccggcaccggtgcccgcagcgcagccgcctgccgaggcgccggtcgtaccgatgccaccggcactggcctgggagccaccgccgctgcagccattcagcgccacctaccaggccttctacaagggcaaggaagcgggcgatgccagcatgcaggtcacccacaccggcggcagccagtggcgggtggacatgcaggtggtcggccgccgcggctttgccagcgtgctgggcctgaacatcgaacagagtacggtgttcgaggagcgcagcggcgtgtatgcgccgctcagccagagcacggtgcgcaagggcctgttcctgggcaagaaggcggtcggtacctacaactggcaggccggcaccgcgcaatggaccggtgacgtcaagaaggaacgcgcgcagccgatcccgctgcaggcgggcgaccagagcgcactgctgatcaatctggcgatcatgcgcgatgcccgcccgggcgccgccatgcactaccgctacgtggacatgggcaaggtccgcgaacacgactaccaggccgcgccgcagaccgagaacgtcgaggtcggcgacctgtcctacaacgcgctgcgggtctaccggaccaacggcggcagaaacgaaaccattctctggatcgccaacggtgtccccaccccggtgcgcatcctgcaacgcgaagacggcgaagatcgcgtcgatctgcgcctgatcgaataccaaggagtctga

SEQ ID NO: 535232 - DNA, 660 bp, Stenotrophomonas maltophilia
atgaccgccccaacccgcatcgccgtgctcgcctcgggccgcggcagcaacctgcaggccatcctcgacgcgatcggcagcggccgcctgccggccgaggtggtcggcgtgttctccgaccgccctgctgcagaggccctgcagcgcgtcgcaccgaacctgcgctgggcacacgcaccgaagtccttcagtgaccgcgccagctacgagcaggcgctcggcgatgcgctggccgcagtacagccggactggatcgtctgtgcaggctacatgcgcatcctcggcgcggccttcgtacagcgcttcgatggccggctggtcaatatccatccgtcgctgctaccgctgcacaagggcctggacacccatgcccgggcgctgcaggccggcgatgccgagcacggcgccagcgtgcacctggtggtgccggagctggatgccggagccgtgctggcgcaggtacgtgtaccggtgcagccaggtgatgacgcgcacagcctggccgagcgcgtgctggcggtggagcatccgctgctgatcgccaccctgcagctgttgtgcgagggccgcctggctgaacgggagggtcagccctggctggacggtcaccccctgtttagccccttggccctagattccgccggaaacctgaaccggtaa

SEQ ID NO: 535233 - DNA, 663 bp, Stenotrophomonas maltophilia
atgtccgcgcctgccctcccgacgtccacttcgcccaccacccaccgcttctcggggcccaagaagctggcctttgccaccgtactggcggtgttcgcaatcagctgggtccacccgctgtggcctaccgaacaggccctgcacagcaccctgaccgtgatcgggctggccgcgctgctgtgggtcgaccgtcgcggcggctggctgggcaacggcgccttcatcgccatctgtggcttcatcgcgctgcactgcgtggcggcgcgctggctgtattccaacgtgccctacgacgcttgggcgcaggcgctgaccggctggtcgccgaatgcggccttcggctggcagcgcaatcacttcgaccgcctcatccacttcctgttcggcgtctgcttcactcccgcgctgctgcagctggcgcgccatgcgtggcccgcgctgcgcctgggccaggccttcactctggcggtgatgacggtgatgtgtgccagcctggtctacgaatggttcgagtgggccatcgcgctggcgctgtcgccggatgccgccgaggcctacaacggccagcagggtgacatgtgggatgcgcatgccgacatgctgatggcgaccgtcggcagcctgctgacgtggccactgatccgtcggagttccctgcaatga

SEQ ID NO: 535234 - DNA, 423 bp, Stenotrophomonas maltophilia
atgactgcctccggcaatccgccgccgctgccgcatcagaccctggcgcagctgcagctgaccagccatctgcagacactgagagtgctgttccatgcactggcctgtttccactgggtcgccgcagtggcgttccttggcctcagtggatgggtggcccactcacgcgggctggacgatgcctggatgctgaccacggtctatgcgtcgatcgccgggctggccgccgtgctggggttcgtgcagctgcacaccgcgcgccagctgtcacatcgcaccgggctggcctggtgccagcgcgcagcctggctgggcgtgctggccggcccgctgggcatggccttggccgcctatgcctgggtgttcctgtccaagcctgaaatggccgcgctgttcgaccgcggcgaccacctcagtgtctga

SEQ ID NO: 535235 - DNA, 1059 bp, Stenotrophomonas maltophilia
gtgaccaacaccccgtcttccgccccctcccccctcacctatcgtgacgcgggtgtcgacatcgacgccggcaacgcgctggtcgagcggatcaagcccctggtcaagcgcagcttccgcccggaagtgatgggtggcctgggtggcttcggcgccctgttcgacctgtccaacaagtaccgcgagccggtgctggtgtccggtaccgacggcgtgggcaccaagctgaagctggcccaccagctgaaccgccacgatacgatcggcatcgacctggtcgccatgtgcgtgaacgacgtgctggtgcagggtgccgaaccgctgttcttcctggactacttcgctaccggcaagctggacatcgacaccgccgcggcggtcgtgggtggcatcgccaacggctgcaccgaggccggctgtgcgctgatcggcggcgaaaccgctgaaatgcccgacatgtatgccccgggcgagtacgacctggccggcttcacggtcgctgcggtcgagaagagcgagctgaaggacggcgccagcgtggccgccggcgacgtgctgatcggcatcgcctcgtccggcccgcactccaacggttactcactggtgcgccgcatctacgaccgcgccggtcgcccggccgatctggagctggaaggcggcgtgaagctggtcgatgcgctgatggcgccgacccgcctgtacgtcaagccgatcctgtcgctgctgaagtcgcacggcgaggccatccacggcatggcccacatcaccggtggtggcctgaccgagaacatcatccgtgtggtgcccgaaggcctgggcctggacatccaggcctcgtcgtggaccctgccgccggtgttccagtggctgcagaaggaaggcgcggtggccgacagtgaaatgtggcgcaccttcaactgcggcatcggcttcgtgctgatcgtggcgccggaccaggtggctgcagtgtccgacgcggtcaaggcgcagggcctggagcactggaccatcggccaggtggtcaccgccgaaggcgccgagcgcgtccacatcggctga

SEQ ID NO: 535236 - DNA, 1128 bp, Stenotrophomonas maltophilia
atgcgccgcagcctgattctgaccctgctccttgcgctgagcctgccggtggccacgatggcccagagcggcctgcgcaccgagggtgatgttgccaccgccactggcgcgtacgaggccgaagtgcccgtcaacagccaagccgaagccgaccgcaacggcgccctggcccgcgccttgagcgttgtactgggcaaattgtccggcgatcgcagcgtgatgtcgcgccctggcgtggcgcaggcgctgcgcaatgccaaggattacgtggccagctacgactacaagcaggaccagagcgtgagcgccagtggcgcccccagcttccgtaccctgctggtggcccgcttccgcgaggacgatgtcgattcgctggtgtcggcgctgggcctgccgctgtggccgcagccgcgcccgaagccggtgctgtggctggccgtcgacgacggcagcggtccgcgcctggtcagcgtgcagcaggccaacgccgcccggccgttgctgaaccgcgccatcgagcgcggctacaagctgggcctgcccagcggtggtgctgccgaacaggcactggccggtgccatctggcgccaggacagcgccgccgtggcccgcgcctcttcgcgctactcgccgccgatgcagctgatcggcaagctctaccgcgccaacggtggctggcaggcggactgggtgttcgtcgacaacggccgtgagctgaacaagtggaccagcaaggacgccaacgccatgcgtgcgatggccgccggtgccgatggtgccgccgatgcgctggtcaagcgctatgccaaggcgggcgccgccgtcggccaggccggcacctaccgtgtagtggtcaccggcatcaacagtgccgatgactacctgcgcctggctgccggcctgcgcgaggtgccggtggtgcgcaacgtcaccccgctgcacgcctcggccggccagctggagctgagcctggagatgaccaccggcctggccggcttcaaccgcatgctgggcgacaacggtgtgctggcgccgagcgcaccgctgccggccctgccgacgccgatcgatgacaccaccggtaccccggtggccgccccggtcagcaacgagtaccgcctgcgatga

SEQ ID NO: 535237 - DNA, 1170 bp, Stenotrophomonas maltophilia
atgactctgaccccggaagcggaaatcgcgcagttcctgcgccgcctgaagtacatcctgttcgccggcctggtcggctgggtggtgtggctgctggcgccgatcctgactcccttcgtgctggcgctggcgctggcctggctgggcgatccactggtggaccgcatcgaggccaccggccgctcgcgcatgaccggcgtggtgctggtgttcgcggcgatggtgctggtgatcgtggcgctgctgctggtgctagtgccgatgatcgagcgccagatcaccaccctgatcgcggtcgcgccgcaggcacaggcgtggttgatggaaaagggcattccctggttcgagcagaagaccggcctggaagtgatgcagtggctggacccggaccgcctgatcgaatgggtgcgcagccactggcagcaggccggcggcttcgccaccacgttcatgggctacgtctcgcgctcgggcttcgcgatggtgacctgggtggtcaacatcctgctgctgccgatcctggcgttctacttcctgcgtgactgggacaagctggtcgagcgggtcgcgtcggtgattccgcgcaaccagatcggcaccatcagcgcgctggcgcgcgaatccaacgaggtgctgggcgcgttcatccgcggccaattcctggtgatgctggcgctgggcgtgatctatgccggtggcctgtcgctggttggcctgaagctgggcctgctgatcggcctgattgccggcctcatcagcttcatcccttacctgggcgcgaccaccggcatcctgatggcgatcatcgccgcactggtgcaggcgcagggcttcgacctgaagctgctgatcctggtcggcgtggtgttcaccgtgggccagctgctggaaagctacgtgctgaccccgcgcatcgtcggcgacaagatcggcctgcacccggtggcggtgatcttcgcggtgatggccggcggccagctgttcggcttcctcggcatgctgctggcgctgccggtggcggcggtgaccaacgtgctgctgcgctatgcgcaccagcgttatcgccagagcgagctgtacgtgggcgagaagcctgcgatcgtgcttgatggcgtggtcgatgccccccatatcatcattccgaacgacaagggccccgacctgaagtga

SEQ ID NO: 535238 - DNA, 507 bp, Stenotrophomonas maltophilia
gtggttgcggtcaccggtccgaacaacaacttcgggctcagcgtcattctgaccaatctcggcggcaacaactggcgagtgtcagcctacaccggctcgtcgcttgtcttcggtacggtgtgggtatacgactcggttgtgactggaacgccgggcaaggccggaatcgaggtgtaccgagagcacaccggggagctggccttcgcttcctgggcgaagccccttcgcatcatgggcgtaactactgccccgttcggggcggcagagggtgcctacatgcaggtgccggctggtcggcgctacgcggtgatctcgtctcgttcgtgtcagcggattgagcgtggtgtgggcttccgcctgaccgggccgcagggggatgggacgggtgcagcgggttcggggcgcttctactatgccggcgctgccgctttgatcccccagcccgacaatgcgacgcagttcagcgcatctggccacttcgtgctgatcgacgtgaccggccactga

SEQ ID NO: 535239 - DNA, 195 bp, Stenotrophomonas maltophilia
gtggatgcagcgggctgccgtacgccgcagatcatggccgacgccgcgcatgcggtgctggtgcgcgaggcggcgggtttccacggccagttcctgatcgacgatgaagtgctggcacaggccggcgtcagcgatctgtccggctatgccgtggacccgtcgcggtcgttgttgccggatctgttcctggactga

SEQ ID NO: 535240 - DNA, 243 bp, Stenotrophomonas maltophilia
atgccgggcctttttttgtgcctgccgatgcgtagcgtcgagccatgctcgactgcgtctgctgtgggcgcaggcatgaaaaaagccgagcatgggctcggctctacagaaaacaggggcgggcagggcgcggcggtgccgcgcctgactcagtcttccacgcgcagcaccgcgcccggcttcagcacgctgctgccgctcaggccgttcagtgacagcagcgccttcaccggcatgccgtag

SEQ ID NO: 535241 - DNA, 438 bp, Stenotrophomonas maltophilia
atgatctttcgccctgttgttgccacggcactgctggccgggttgttggccggctgtgcttccaccgcttcccagaccagcgccgacgcgcctcgccatccttccatcgctgccgatctgagcccggtaccggcctttaccgggggtggcactggctggagcatcgagatcgcctccacagggaagggcaaccacgacgccagcctcagtgccgatggacgcacccacaagggcgtgctgcgctacctcggccagccggccgatgcacccggttcgctgatcgtgctcaacggtgagctggacaagcagccggccatcgtcgagatcaagcacgagtcgtgccgcaacaccgaaggcgtggacacgctggccagcgtgcaggtgacgatggaagggcaaccacaacgacgtggttgcggtcatctggccgtgtactga

SEQ ID NO: 535242 - DNA, 861 bp, Stenotrophomonas maltophilia
atgtccctgcctgcccttgccatcaccgaaggtcgcccggcgcgcgccaacggggatcccctgcggcgccaccagcgcctgttgcggatcggagcccttgcctggctgggcgctgccgcgcttggccagctgctgtttgccatctacatcgtggggttctacggaagcagcacgctggccggccagccgcagcgctggaacgaggtgatgccacatggctatgcggccggtgcgacggccttcaatgcagtgctggcgatgcacctgctgctcgcggccggcatcgtgctgggtggttggctgcagctgtggcctgcgttgcggcgctgggcgcctgccgtacaccgctggaatggccggttctacatggcggctgccgcgttgctggcgctgggcggcctggcgatggtgtggatacgcggtggtgccgccggtgacactgcccagcacctcggtacctcgctcaacgccgtattgatcctgtggtttgcggcagcagcgtggtggcacgcgcgacagcgacgcatcaccgagcaccgcgtctgggcactgcgcctgttcctggcggtgggcggggtgtggttcttccgcatcggcctgatgctgtggctgctgctcaaccagggcccggccggcttcgatgcggatacgttcactgggccggcgctgaccgcattggccttcgcgcagaccctgctgcccctggcggtgctggaactgtacctgcgcgcccagcggcaggcggggggccttcgtgcctggctggcctgcgcgacgctgctggttgcggcgctggcgaccctggccggcagcctggcagcggcggcgttgatgtggtggccgccgctcgcggccggctga

SEQ ID NO: 535243 - DNA, 138 bp, Stenotrophomonas maltophilia
atgctcggctccagcaaaaagcagccgagcatgggctcggctctacagaaggcgatgcccggtgccggaaagccgatgcacaatgacgcgaattgtaatgttgttaagaattatttacatttgcgtcctgcgcagtga

SEQ ID NO: 535244 - DNA, 726 bp, Stenotrophomonas maltophilia
atgatccaccagactgaactgcgcgacctgctacccggcatggtccccttccccaccgacgtcttccctgccgaccaggcctggctcggccagcatctgctgccgctgctgaagatcgacctcggcctgctgcgcccggaactggccggccagctggcgaccatgctgtgcccgatcgaaccctatgaaggattgatcggtgagtgcaccgaagcgcaccacaacgagctcaccgccaccaactggattgccttcgaactgactgcggacaaccgcatgcgcttcctcggcaacgagggctacttccagggcaacgcaatagaagacgaagacgcgcgtgcgcacatcgccgagatgcgcgacagccatgccaaggccagggcgttcttccagcagcatggcaagctggccagctactcgcgctatggcgatggcgagccgggcgaacaggcgtggctggatacgctgggtgggcagatctcgaccggcaactggatcgaaacgaccgacgttccgccggccttcgcactggaattcacggcggcggccgacgactgggatgcaccggaggacacggaacgggccatcatcacccgtgacggcaggaaattcttcgccgtggccgaagtggccggctacaactggtgtgcggccggcgccgatgccatcgtgatgctgtacgagccggtgagccgcacggtgctgttctcgtacgactggtcgtaa

SEQ ID NO: 535245 - DNA, 603 bp, Stenotrophomonas maltophilia
atgaagctctactacacaccgggaacgtgttcgctggctgctcatatcctgctgcgcgaactgggaatcgagttcgatatggatcgagtcgaccacgccaccaagcgcaccgaaagcggcgaggatttcctcaagatcaacgccaagggctacgttgccgcgctgcggctggacaatggtgaagtcctgaccgaaggcgcggcgatccttctctaccttgccgatgtggcgggtgttgaattttcggttccggtgagtgcaatcggcgcggcgcgcttgcacgaatggctggtctacatcgccgccgaactacacccgacatttggtccgctgttccatcccgagtcggatacagtgctggaacggtccaagcagcgactctaccggaagctggacattgtcgaatccggcttgtccgatggccgcagatacctgttgggctcgtccatttccattgccgacatctacctgttcgtagtggtcaactggacagggcatcttggtatcgatctcaccccctggccctttacccaggcacttctgcagcgagtcagtgaacggcctgcggtgaaggaggccatgaccttcgaagggctgctgtaa

SEQ ID NO: 535246 - DNA, 357 bp, Stenotrophomonas maltophilia
atgggcttgaaggtgcgaaaaagccaagcgcaggatccgggcagcatctgtccgttgaccaaatgcatggcactgctggcgggtgcctggacggccgagatcgtgtggtcgctgagcgcggggccacgacgctttggagagttgcgcatcgatctggcgccggtgacggccaaaacattgacggcgcgcctgcgcgacatgcagctgaaggggatgatcacccggcacgagcgcgatacctcgccgccttcgatcgaatacgcactcaccgccctgggggcgcaactgttgccggcgatccacgccatcgcacgcgttggcaatgcactgaagtttggagagccggaggtgggctga

SEQ ID NO: 535247 - DNA, 1560 bp, Stenotrophomonas maltophilia
atggatggagagatggagttcgttgtagtgccgaggtctgggagagcgactgaggcgcctaagacggttaatcttcatgtggatcactggaatgatttttcttttgtgaccatgttcttcatgcggtatttcgactccaaaggggtggagcacgaactgggtcaattaaagatcgggttcaaggggcagtcagaggagcaatcaactcattcagtgcttgagcctcgctttaacaagctcgataagtctttcttttcgctagggcaggatgttgattactacaagaatctatccaatcttcctgcagacgagagggatgaattagtcggttcgattcgcgacattgttgcgcacccctccatctatttggaggttgaggaggagcgcgtgctaaagaccgcgttactccgccatgtgagcatgtcgctagttcgtggtcagtatgcacgagtgctgcagggcgcagcagagttgactgactataagttttcgtacgtaaaatctcccgttggcgacttcgacgggctgcgcatcgattttgatgttctagctgaatccacgccaagtacaagtattcacgcgatcattgggcggaatggagtggggaagacgactattctcaacggaatgatcgctgctgtcatgtcgcccggcgccggcaatgggtttgtttcgcgcgatggatatcgagaagctcctgttgaaaaggattattttagtgctctcgtgtccgtttcctttagtgcgttcgatccatttgatcctcctgaagagcagcctgatccaaccaaaggcacatgctattactacgtcggccttaaaaatcgcactggccaaggcatcttgcgaacaattcaagagctacgggccgacattgcagctggattgattgagtgcttttctaaccttcgaaagcgcgctaggtggatcgcagcaatagaaaaattgaactccgatgacgtgttcgcgtcaatggatctattgaagttgcccgagctttacacaagattgagtggagggagctcagtgcgcgatcccagggcattcaagggaaagatggctcagtttttagataagctgagttcgggtcacgccatagttttgttaactataacgaagctggtatctcgtgttgaggaaaagtctctagtacttcttgatgaaccagagagtcatcttcacccgcccttgttatcggcgtttgtacgagctctcgccgatcttctgcaggatcggaatggtgttgctatcgtggcgacgcactcaccagtggtgttgcaggaactgccgaaggggtgcgtttataaggtttctcgagtgaggactaagatatccgtggatccaccccggattgagacatttggagagaatgtcggaatcctcacttcggaaatttttggcttggaagtggctagatctgggtttcatgaccttttggcaaaatccgtcgacgctggtatgaattttgatgatgtagtcaatcagtacggtggacagcttgggtttgaggcgcgtgctattttggcggcgcttgctcatgcacgaggatatgatgaataa

SEQ ID NO: 535248 - DNA, 876 bp, Stenotrophomonas maltophilia
atgaataagctcgagcgtccggatatggattatgtcgatgttctcgagctgtgttcgaatggaattacgggtttggcggaactcaagcgtcggtttgattcgagtcgaggggagcttgttgagtgtgccctggattacgaagaaagagcggctgatggtcgggtctatcagatcgcgccattcaatggtcatgaggattcaattgtcttggggcagctttcctctaaggatctggggaagctgtacaaacagtatttttcggctaaaggaaagccggcgcgcgatatctacaatcgactgatgcttgcggcaaaggaacactgcccgttttgcggaggtatcggtcgtgcgacgaatttggatcattttttgccgaagacgaattttcctgcttatgctgtatatccgtctaatcttgttccaagttgcatggattgcaatatgggggagaaggcacagttgtaccccgatgtgtacgaaggtcagtttatccatccctattgggaggatgagaagttctttggtcagcagtgggttcgcgccaagtttgttgcttggcccgctcttgaggatagtgttgtcgaatatttcgtggatgcgcctgattcttggctcgcagcggagcgagagcgtgtcaaaaatcactttgaggcgtttgatctacctaagcgctattctgtgaaggcggcggagcagcgcggtgtggtggtcgctcagattgagtcgatgcttaatgatggtttaagtccgtctcaagttaatagattgatcctgattccggcgatcaatggggtggatctcccgaatgcgtggctcaagtgtatgtatcaggcgttctctgattggctgatgaagtgtggccgaatgcgcgactag

SEQ ID NO: 535249 - DNA, 213 bp, Stenotrophomonas maltophilia
atgcagcccgccttcccgggcgggctgcatggccgtgccgaccgcgcgctaccccgccttcccgtgaggaatgcggataatcgacgcggtgctgtgcagggccatgccgccagcgtagagcgccgcctgttcggcccgcaaccccctgcggcagtgcagcgcgcgcaacgtttcgttggcatctatgctcggcgccattcccgcatggaatga

SEQ ID NO: 535250 - DNA, 498 bp, Stenotrophomonas maltophilia
atgaagaagcacggcctggccgctgcggcggcgtgcatcgcggtgatcggcgcgatgtggatggagtggctcgaaccagcgggcgataaggtgtgggcctatcagaagctgcagccggccgattaccggttgctgcacagtgatgcacttggctttgtgaccgcgaaggcccacgagggctctgaactgcacgcgcgccatgccggggctacgtccttcgagatccgatgcaagggcgttcgggtgctggcggtggagaacgcatcgccgcgtgtggtgatccgaatccctacggatgcactgcggcgtgcgcctgacatcgcacacttgcacgccaactttcgccgtttgttgagccaggccccgaaccgcgcacggttactgtgggcatctgacgagccgtcttggcttggggcaaggttgcatagcgccttaggacgcgtgccccgcaagcagccgtgcgggctcgacgctactgttgacccgcaccgctcgtaa

SEQ ID NO: 535251 - DNA, 159 bp, Stenotrophomonas maltophilia
atggcacagcagaaccagaacccgaaccagaagcagcagggccagcagaaccagcaggatcagcagcagggtcgtggccgcgaccagcagcaacagcagcaggaacagcagaagcgcaaccagaaccagcagcagggcggccacgacgaagaagaatga

SEQ ID NO: 535252 - DNA, 1164 bp, Stenotrophomonas maltophilia
atgatcgaaattctgctgcttacaagaattcttgtggactatgcttgggagtacaagtcgctcaacgtcatccacacggggttcgtattggttgccgcagctttctacatttcgagaaagctgcgaactgacgccaagctcaggaaaaccgacattttggttctgctcttcgcaatctatgttgtttattcattcatcaccaccagaacagaccgcggcctatacgatttcgtaaagctgatgccttgcgccgcttactacgccatcggacgcttctacaatcggtcgcctgccatgtcgatactccccggagcggcagcggcgaccatcgccgggcttttccttgccgccatgataggtgttggctacatagactggggcggcatcaagaccttcactgccggctacttcttcaaaaccgatgccgcacttggcgtggtcgtactgacggcatttgccttactttggtcacgcaatacccttgtcattgccgctcttgtgctgaccagcagctccgtggtgttcgccacaaacgcacgcatcgcaattccgctggttctcgtactacccgggctcctctacttgagccaacggggactgtttagtaaaagcaccaaggcgcttgcatttacatccgcattgaccgtcctggcaatcgggcttttctcgttcatcgacctgggctcattgaatctactgggacttgacctttccgaccccttctccgacaagaacactcaagggcgaacccacatctgggccgcactgattaattattacaacacactggatatttaccacaaaatgaccggtgccggccttgctgcagacattgttgccgcgtcaaacttctaccagaacgacggatttactgagtcaagagcacacaattcgttcctttggctccttgtttgttttggatggctcggcggcgcactttatctgagcatgctcgctggatttgtccgccaagcgcatgctatggcgcttgaaaaccccaaatcaaaactactcttcctttttgcaggcctgtttgtagtttttctggtgttttcgatctccacagaagccgtagtcaagcctcagattacattcccgctgttcctgtttgcaggattttgtgcaaaccccttgttcagaaagccagcaccagcaggaagctga

SEQ ID NO: 535253 - DNA, 1134 bp, Stenotrophomonas maltophilia
gtgtacagtctctgcttctcgatatcgatagtctgtgccggaatgatttcctccggcctggtcattcaattcgccgtatacctgcccaccaaacgcaacgaggatcacccggcggcccttaacacctatctagccataattacagcgctttgcgctgtaggaactttgctaggcgttgctgccgatatgtcaccgcttttctcttcctcgctgttcaagcaaacgctgatttgcggtgcaatgacctgggcaatcagctcgagggagttggttctaaggtatatgatgcatcgagaggaccatcgcgacatcagggtatcgagcttgatacttctcgctagtactacttgtctcctcctgatcccgcagtctttttcgtcacccttggagtgggcggcatttgcctacgctgcgggaattctgcttagcttgttcccctgcttcctcaggaacagaaaaggaatagcgcaggtatctctggccagcatgcggggggcagtcaccgagtcttggcacggtggtcgctggggtgttgttagcaacgccttcttttcgatcagaaatcaggcacatacgctccttctggccccgcttgggccatccgttgttgctgacgtcaacgctgcccggcttgtcttcatgccgatgtaccagatcgcaccggttatctcgcagattgggctgggtgcgatcgcaaagctgaggtccacggacgaactgcaggcggtcagatatggcgagaggctcgccaagtactcggccacccccatcctgacctacggaattctcgtatccatctgcgcagtggtgatgaagaccgcattgattccagcagaatactggaattcaatcaattatttactcggctggtgcttggtaacgagcgcgatggcagggagaattgcatattccactactctgcaggctctgcaacagttcaaatcggttgcgtcgggaaacatcgcatccctctttgcgctttttggggtatgggtacttctcaagaatacagctggcgcacctgcaattctatatgcgatggccggctcagaggcgtgtgtgatgcttatctatatgcgcaagatatccctgatcaagtcaagatttctccttcaaggtccaagcaagccatga

SEQ ID NO: 535254 - DNA, 1134 bp, Stenotrophomonas maltophilia
atgattcatacagccggaaggcgtgtactcatagtgcagcgtaggatgacacactatcgcgtgcccttcttcaacgctcttcgcgatcacctgtcgtccttcggaatttctctcaacgtggttttcggagatcccaccacagcagagaagcggaagaatgacagcggaagattgccttgggctcagcattcgaagtgcatttactttttcggagacaggctctgctggcaaccgtttttgagtcaggcgagaaaatccgaccttgttatcgttacccatgaaaacaagatgctgttcaatcttcttgctcagtacggactgcctgacaagcgggtcgcactttggggtcatggcgctaatttgcagggtagctctggcacaatccgcgaagccttcaagcgtcggaccgcagatcgggccgactggtggtttggttacacagagatgagtctgccacttatccttgccagcggatttccagcggaccgggtaaccatcgtggagaactccatcgacacactcgcccttgccagagagtttgccgaagctaccggcaagacttctacccggcccgctcgtaaattgcctttaggcgcctacatcggctcgctttaccaggaaaaaagaattgatttcttgcttcaagctgccgagcgggtgaagtcaagggttcctgacttttgcatggtcatcgctggcgctggtccagagcagcagaaagtggagcaattctcgtctgcaaatccctggctcagctatgttggcaccatcgacaccaaagagaaggccacgcttctagcgcgtagccgtgtcctgctgaatcccggcttggtgggactgggaatccttgactcgttcgtatgccgaacgcctctggtaaccactgattgtggcttgcacagccccgagatttcctaccttcggaacgggcacaacggggtgatgaccgctgacaatcttgacggcttcgccgacgaggttgttcggttgatctcagaccaagagcaccacaggcgtttggtagacggatgtatagagagttcaagccgatacaccattcagaacatggcggagcggttctcaaatggaataaaagcatgtctcgatgcgaacattcgtaggggctcgcgatga

SEQ ID NO: 535255 - DNA, 1173 bp, Stenotrophomonas maltophilia
atgaaagtccttctggtccataacgcataccaagtatttggaggcgaggattccgtagtgtctcgggagaggtcactcctggcccgctctggacacacagtggccacttacgaagtctcgaacaactcgatctcgggactggggggacgcgttcgggcggcgcttgggactgttttctccgtgggatcttacttcgcggtgacaagagctatccgtgagtttcagccggaggtagtacacgttcataattttttccctctgatatcgccgtctgtcttctacgcatgcaaacgggagagggttccagtagttttcacactccacaattatcggatcctgtgcccaactgcgacgttggaatatgacggcgaggttgttctaaaaagccttaaagatggtccgtggtgggcacttcgccagcgcgtgttccaaggatcactcgctgggacattcgttttgtgttccatgatctacatccacgccaggatgggcacatggaacaggatggtggatcgattcatcacgcccagcgagaccagtcggcgcaactttctagagggcgggctgccctctcatcgtctcgcagtcaagccgcacttcgttgaaatagatgaggatgccccccaacccagatctggctttctgtatgtcggccgactctccgcagagaagggcgtttcggtccttctccgtgcgattcatgcactcgcccattccagtccttcgatagggaaggatgccttttgtattgttggtggtggccccatggaacagcactgcctggatgcgggagttcattcgttgggggcgatgcaggcgtctggcgtgcaggagatgatgcgttcagcgacagcccttatcgttcccagcgtctgccaggaaacgttcggcttggtgatcatcgaggcttacgcttgcggtctacccgtcattgccagtcgtattggcgcattcgaggaattggtcgtggagggtcagaccggactgacattcgaggctggcaacgcggaagatctcgccgcgaagatcaagtgggctgcggaacatccgcttgaaatgatgcgcatgggatcgcaggcgcgatctcgatacgtcgatcgatataccgcagaacgtaacatcaatttgcttgtttccatctacagagaagctgcggaagagtaccggacctag

SEQ ID NO: 535256 - DNA, 612 bp, Stenotrophomonas maltophilia
atgcgtctaacgcatcaccacgtcctgtcagcgccagaagtaccagacagcccctgccaccaacgcccccagcaacaccacctgcaccaccacatagcccacgccactgtcgcgcgctcagttcagccggccccggcccttcatcgccaatacccagttcctcgggtacttccaccgccaccatccattgcgcctccagccgtcgcctgcgcaggtgttgcaacgcgctggtgtaggcgacccgggaaacccaggtacgcaacgaggattcaaagcggaaacggtgcaactggcggaacaccgccaggaaggtctcctgcagcaggtcggcccctggtcgcggtcgccgaccatccgcccgatcacatgcgcgcaggtgcgttgatgggtctccaccagctgcgaaaacgccgcctgcgagctgtcgatgatggcccgcaccaaggcttggtccgcatccagcggtgcagcgggtgccgccgtcgccgctgcatcgtggcggcgacggccccgcagtgccgacagcgcttcgccgagcaggctcatgcgcggggcgcctcctgtgcccgtggcatgtcctggctcagcccttgcgtgcggcaggacgggtga

SEQ ID NO: 535257 - DNA, 189 bp, Stenotrophomonas maltophilia
atgctgggctggcggcagcgtgccgcgccccggagaacgcacgtgcaggacagcaagcccccggtctggagctcacagaagtccatcctggtcgcggtgatcgtcgccttggcggtacttttcggcggctaccagatcggcaaggacatggcgctgcgagacaacgcccgccaggcagcaggcaggtaa

SEQ ID NO: 535258 - DNA, 225 bp, Stenotrophomonas maltophilia
atgggctcgtggtactggtcatggatgatcaccttcctgctgggaggcctgatggccctggcgacgctggggctatgggcctggctgccgggcgatgttcgcaatctggccatggcgctgatctgggtgctgtgggcgctggccaccgtttccttcttcctggggcatcgccgatggctttacgatctggggcgtcaacctcggcaggaaagtatggcgcgctga

SEQ ID NO: 535259 - DNA, 1569 bp, Stenotrophomonas maltophilia
atgccggcagtacatccaaagcgacgcacttccctcgggtcgcttcctgccgtcatcctcaaggcgaagcctcgggccggccggtgcgggaagcgacagctgccctcgtgcatcgggcccgggcaccatcgccgttctgagagaaacacgcgactggcctgccgccttccttggagcctgtctagcccctttggggggcgtttcagcgataataagtgcacgggaggggctggcgctgctctccactgtcgtgtaaacaggatgggcggcgccttcctgaccagcggccacagccaaaacttagatactcatatcactgtcctgaaatcgcagatgcgcacccagccctactcacgcaacaccgacagcctggggcgctactacaccagctcaactgttagctccctactggtcgaccagctgccagcgaaaaagccacgtgcagtcctggatttgggatcgggaggaggggcgctgtccctagccgcctccaagagatggtcaaaatctgggctggtcactgtggacgtcgatgatggggccatcgacctgggcgaaaggcttcgtcagaaaggctttcaggggcgtcatgcgcacttccttcatgacgcactagctcccgagctggcagaggtactacattccagctgggcagggctacctgacgttgctgtctgcaaccccccgttcatcatgaatcgttggcgcgaatcatacggatcgattttggaggaagtcggctttagcgggtgccttcccgccattgcctcgaccgatgtggcagtgctttttttggcccagaacttgcgcttgatagcccccaatggttgccttggaattattgtcccagactcactcgtaagcgcggagaagtacttgcggtttcgtcaggaactgctacgtcgtttcgttgtctcgcgcgctactaggctgccgcgcgggtcatttggtggtaccgatgcacttgcccacattctacttgtccataacatgccccctcggactgaccaggtgggcttgtctcgtctacttgacgacggcgcgcttactccgacgctaacagtggacatcgccgaggcagctaagcgattggaccacgactttcatgccagccgatccgccgtcagccgcacttcaaaacggctcgcgagcgtggtcgaggggatgtgtcgaggagccatgaacagtgctcaggcacgtctatcggatgggcttgtattacacacgaccgacatcacccccagcatgtatggccgatggatcgacttcagtgcgaaagcgtttaggccgcctgccggcactaagcccgagcacctcgcagttgcgggggacatacttgtagcccgtgtgggaaggacggcgccggataaggtgatcggtatcgcaaaaggaggggtcgcctacactgactgcttgttccgaatccgcgtcccagccgaatggcggcagcgtgttctcatgagccttacgtccaccgatgggcgcgcctggttggagcggcatgggtgcggcgtggctgccaggcacataactcggtctgatctgctcaacttgcctctggtgctttga

SEQ ID NO: 535260 - DNA, 1764 bp, Stenotrophomonas maltophilia
atgaacgcgattaaattagacacgccgccggcgctgacggatgaagaagagcgcgaggtcgagcagctctacgaagagcgcgcggatcacctcgagcttgactcgttccagaacaacaccgccctgaccgatgactcagaggattggattcgttcgctcactgggaccggcgccaagctattggtagggccccgcggctgcggcaagacacatttgatgcggtttgcctttacgcaatgcgtcgccgattcagatcagccgctcgcggtgtacaccaatctgaatcgctactacacgctcgagccgctattgcgacgtaggccagacgctatgtcgatgttctacgtatgggttcttgcgaatattttgctcggcctccatgagtcagtcgatgcttacagtagcgcctcgaacgatacttcgataaatattgaggagctgcttgagtttgatcgcgccgagattcggaatctgataggcgcttttgaaagaaatcacccgctgagctcagacctcgaagctgtcgcaagcaacttatccatcgaccgcgtgaagcttctgctactccgctgcgcagacgcattcaagcgacgtcgcgtagtactgcttctggatgatgcggcactgacactcacgccggaatacctttctcatttcttcgacatctaccgcgcgctaaaggcgtcacgcattgcgcccaaagcctctgtctaccccggaactaccgaatacgggccaaactttcacgcaggacacgaagccgataccgtctttgtgtggaagcgcgtgactgacgacaactacctgacatttatgcaggatattggcgcaaagcggttcccggacttggtccagatcccggaagacatacgcgcattgctcgcgtactccgccttcggtgttcctcgtgcatacatgacattggtgcgcggctatctaaggcaccaaaagagcacttctacctcacagagtactttcaacatcactatcgaggagttcctcgaagaccgcatacgcgagtacatgacattgcgagagaaaaagcctcaattctcaagcattgttggggtcggaaagcgtctgtttgacggaatggtcaaggcagtggtcgaggcaaaccaagcccttctggaagaagatacgcgacagctcaacatcggcattgatgcgtcgggagtgatcgataagccatatatcaagcgaatgcttcttttgctcgaagaagttggcttggtctacagccgctctggcgtctcgcacggcgatcgcgactaccagcggttcgtgccccacctcgcagccgtacaatcccaacgagcctttgctcgaaaggggggattttcgcccaagtttgcaatcgagatgctttctcgtcccgatgaaaagcacccagtacgtcgatcaatttctacgctccttgactccgccacgctggatggcctaggtctagatctacccaactgtttgaactgtcataccaagcgtgtagagggggcaaagtactgctatttctgtggtgaaaagctcaccgacgaatcaacctacgaccgacttatgctcacggcgttagccgacgttcctggtttgacacaatggcagcgcgacaagctaagcaattgggagtctgtgccgaagacggtaggggagtttattgcactccaagatccaggcactacgttgcggacgattccaagggtcggaaagattcgcgcaaagacgatcattgatgccgttcaaaccttccttgacgaatatctctcctga

SEQ ID NO: 535261 - DNA, 375 bp, Stenotrophomonas maltophilia
atggacctgcacaagccgcttctcgaaaagcctttgaagctgactgttagtcatctagaggatattgctgaggcgctggaggcgctagtgcgcgccgttaactcttattgcttcgcggatatcttgaagcggacacactccgctggccccacgggaagggagaagaaggcctaccaagtggcttggcagctcgattgggcaatagacgaagagcgattctccgactattacgaaatttttgcctcgcggggcggcccacaagcctctgcaccggccaaggacctctacgacgcttttatggcttatatcatctcgtacgacgccaatcggaagaaggcagcacctcgcgtcaccaacgcagaccagattgtctga

SEQ ID NO: 535262 - DNA, 297 bp, Stenotrophomonas maltophilia
atgattcatggatggctggaaaagcccagctacatcctgctagcagggatggtgaagcaaaagcgcgcattcgcctaccacctgatgcatgtgaaaggcatttcattcaaacctgaattcttcatctacgcagcgacaaacgatgtggaaggcgtccgtgcaaaagtttcgcagccggtgcatgttggctgcacgccaactcgacagcgattgccctacggtgatcccaccttcaaccgttgccacgcccgtgaacctgcagacgctgccatctcttccgtatcgcatgctgcctga

SEQ ID NO: 535263 - DNA, 261 bp, Stenotrophomonas maltophilia
atgcacggcgagctggtggtcgacaagcgacgccacgaggtgcgtgtgaccgggcgatgcagctggtttgcgatggccctgaccgtgctggtgctgcccatcatcctggtgcgcccggtggcgtggccgatgctgggcatgctgctggtgttctatatcggctatcgcatccagcggcgacgctatgtcgaagttgtggaagccgttcgcgcgcgggtgcgctccgagctcccgcgacggttcgttgaccctagccggtag

SEQ ID NO: 535264 - DNA, 849 bp, Stenotrophomonas maltophilia
atgcatgttttcccggatgacagctctctggattcagcgtgtcggtcgatttccagtgaagctgccaaggcgctcgtgagcttgaaaggggagcgaatcgccgaagatgccgtatctgtcatcgaagactggtttgagccgtccctggagaaagcgcgcctgttggcggatctcgatgaaaaaatcaggatccaccgtagcgaagggagtcaggcgctgctacggcctgcgctgaaagcccgggcgatgatcgcggcctctcccgaccctgcgcccgatgactacgagccttcattcaaagtactgcctgcgacgacgctcgatggcgactggaggtccgactgcgaaaccgacagcgtgattgtcgatggtgacctgatcgtagacggcacgctgatactgaacgacttgagcgagaggctctgcgtgatcgttctgggcagtctcagtgcccggaatctcgactgtggtggttgggtcttcgtgcgtgatgagctgaaatgcgaacacctgtacgcatgctcactcaatgatgggatcctggctgtaggtggcgatctgactgttcagaccttcctcgagacgggcacttacacccaagtggcggggcacctgaccgcgagctacctcggcagcacccacaactccattgaagtgaagggcaaagtgaactgcccggggttcgaaagacgatctgatagcgactacctttgcgaatggatcgatcctgcgctggcggaaaccgacgattccggcgccgattctggacgcgaacccgaactgtatccttcggctggctatccagaccggatacgcgcggggtgcagtcctatcaagtccaggctttag

SEQ ID NO: 535265 - DNA, 429 bp, Stenotrophomonas maltophilia
atgcaacaaatacaaacagttgagggcgattcgctaatttccgagttgtgggaattggagaaggcatcactgaatcagcttagccagagcctcggagttaccgcggagcagcttctgaccgcggccaatcgggagcacatccctgacaggatgttgctgccaggcccagtcgccgtgcatgtggacggggttcgttgcttcaccccgaccgacttgggcaggcgcttgggcctatccgctcagaagttcaacctgctgctggcagaccgaggacttcaggcgaagcgggacggtcaatggtgcccaaccgaagccggcgagctgttcggcgtgatgctacaggtccgtaagaggcagcagaccggcactgacgtgcttcagctgaagtggaaggagactgtcttggcccatatcggctacgcagtctga

SEQ ID NO: 535266 - DNA, 648 bp, Stenotrophomonas maltophilia
atgagacggcacggttctgaccacgctcgctgcacagccccagcaatcgctgggcaaatcccaatgggcagaatgttgagcctgctaagctcaatgcccgtagggcttggagactatgccgggatggagatgcttagtgttgattggactgctgtttcagtagctgtcgccgttctggtgttcgttgctgaccgcagagataagcgacaacgactggcggcttccagcacagtagtgatggaattcctggctcaggatatggttcgccttgctaggcagtcgagggaaatggggatgtacgctgcttcgctgcctatccatgacccggagcgcagttcacgcgctgatttgtatctcacacagcgggcggaaaaactgaacatcggtacccttgagcgacatgcggatgacctttcatcgctgccaacgacagtagttaatcgttgtgctgtttgcctgaccaatatccggctattgcaggaaaaagtcgagcttatgacggctgatcgaccggtcggtcgtcactacttaagctggaaggacggaaagcatgcagtcaatgttgcagctgcagagttgatgcgcagcgcggaggcatgtaccgaagcaatcgatctcatccggcgtggttctctagtccgatcgtag

SEQ ID NO: 535267 - DNA, 621 bp, Stenotrophomonas maltophilia
atgccgcttcgaccttacctacgtactgcggaaccgatcgttttagacctgacgcgcgatctgctcctgtgttacagccgcgcggacggaattccggctaacaagcaagggaaacagaccccaccaaactgcggcttgcgactcaccttcaagcagccgcctcgcgggccaagctgcggtgggcaaaggaaatacggatcactccaagcgattgatgtcgccgccattcgcggattcgagttcgatatatttataccttacttttcaacaacttgcaccgaaccaacaataggtctatacagattcaatcagaccggacagagcgcgactaagcatgccaggctctcagatccctcccgcaccgcccccttccggctcgttctgggcggcaccgttgcttggcgtaaccgtccccgacagccccatcttctcagcggcggacacagccaggctgttgggcttccccacaagggaggccctcgcaaaagcacgccgaaccggacggctctctataaagatgttccagattcctggacggagaggctggttcgctcgtcgcgaagaggtatgcgcctggctacaccaatccctgaacagcgaggaggaagcccgatgagctag

SEQ ID NO: 535268 - DNA, 1149 bp, Stenotrophomonas maltophilia
atgcgcctgcgcaatgagggcatgacgctggaggtggccgacggctacctcctcgtccatgacatcccttatgtgaatgcaagccgcgaaactcgtcgtgggacgcttgtctttcgcctcgacctcactgcggacatcgcagtgacgccgtgcgaccacaccgcctatttcataggggaaacgccttgcgacgcgaggggggcgcggctcgagaagatcatcaaccacagtagcgagcagcagctcacgccgcgcattagggtcgatcattacttctcggcaaagcctcggtcgggccgttacgttgattactacgaaaaggtcatggcctatacgaacatgctggttggccacgcgcaggccatccatccctccttgaaggcgcaggtgttcaagcccgtccttgcacaggaaggtgacggtccgttcgtgtataccgacacggcctcgacccgtgccggcattgcagtggcggcgggacggctagccggacaacggatcgctatcgtggggctgggcggtactggcgcgtatgttctggatctgatcgcgaagacgcctgtggctgaaatccatctctatgacggcgatcaactgcagcagcacaatgccttcaggtatcccggcgccgtgcctttccaagtcctgcgggatggggcgaccaaggtcgactacctcgcgagtgtttacagccagttgcatggaggcgtacgcccccatgcagtcatgatcgagccgcataacgtagccgagcttgtcggctacgacgctgtcttcgtctgcgtcgaccggggcgaagcgcggaggctgatcgcggacacgctcggcccgaccgacaccgtcatgttcgacaccggaatgggcgtgcagctcacccccgagtccggattgttcgctatcgtccggctgtctgtgctcgacccgcagaccaggccagacgcgctcaggacgatgcccatggcgtcgcacgaggacggcaacttgtatgccaccaatgtgcaagttggcgatctgaacgcgctcaacgccttctttgcagtcgaagcgtggaagaagcgccgtgggttctacatcgggagcggagatgccccgctcaccacatacaccacggcgacgggcaccgtggcctccacgcgggtgggcgagtga

SEQ ID NO: 535269 - DNA, 699 bp, Stenotrophomonas maltophilia
atgaccacttcagatgctcgcggcagcttccggctgcatatcgcacacgaagggttcgacttcgaacccgcaaccatcgacgatcccgtccccaccggcgcccagctgctgaatgcagccgggcgccacccggccgcggatcacctgatcttccagctcttgccgcatggtgcccttgaggaaattcgccccgaggagaccgtcgacctgcgcgcccctggtcgcgagcgcttcatcaccttccgcagcgatcggtccttccgcatgcatgtggacgagcaggcccgggattggggcctacagacggtcaccggcctgcaactgaagcagttggcccgcgtcgtgccgaccgaccacgatgtgttccacatcgtcgtcggcggtgaagaccgccttatccgcgacaacgagatcttcgacctgggcggcgccgaggtggaacgctttgccacgcgacgaatcgcgctcgaggtcttcgtcaacacgcggccccatcaggtgcatcagcgcgtgctggatttctggtcggtggtccgactcgcacaccccgacgcgaacccagcggatgaaaatgccgaatacaccgtgacctacagccgcggaccgcacgcaaaccccgcgggcaacctggtaatcggacagtccgtcgaagtgaagggagggatggagttctatgtgctcctcactgataagtcgtag

SEQ ID NO: 535270 - DNA, 216 bp, Stenotrophomonas maltophilia
atggcgcagcccaaaaaaactatgacactcaatctcactgatgctgagatggaggcattggaattgttgtgtgaccggaaggacatgagtaagacggccgtactcaagcaggcccttcgcctttatcaggccgtcgagatgcgcctggctggcggcgaaaagctcttcttcgaggatgaagacaagcggaccaaggctgaggtagtgatgctatga

SEQ ID NO: 535271 - DNA, 639 bp, Stenotrophomonas maltophilia
atgacccactatccaggtcgccgctatctggtggacatgggggccggggagttggtggaggccgaaatcttcgacgccatcagtcctgccgacatcaacgactggcgaatgacctggaaaccggagatggatcgcgtcgtccagacgcttcaggcgcaaaacgtgccgcaccacctgtggccccagagccatcattgggattggagcaacaaagtgcctccgcccttggcgatcttcgaaaagggctacgccctgcgatgcgaggggcggctacagggactgatgcgcgtgaactcggtttctcagcgatgtcgcttgcccgaacagcaggggtcggactgcatctatgtcgacttcatcgagaccgcaccttggaatcaggcgtcgtattccgggtcgccgaagtacggtctggtggggtcggtgctgatggccgcggcgattcaccagagcgtggaccaggggctcaagggacgattgggtctgcactcgctgccgcaagctgacacgtggtacgcccaacgtctcggtctgaaggacttgggtctggataccgaccgctaccaagggcggctcaagtatttcgaggcgacgcctgaaatcgcggcgagcattttaaacggagtcaaattcccatga

SEQ ID NO: 535272 - DNA, 480 bp, Stenotrophomonas maltophilia
atgaacgagagcttgagggactggagtttgcgaatggcacggctggagctcggccaagagattcgtgctggaagcttcgggttcaaagacgttccggcgtcggttgaatctggtgccctgtccgaggcgggtacggagtcaaaggtcgtctttgcaagatttgtcgagctcatgcgccgcaagcgcgggcttacggtcgagcaactggcggacgcgtgtggcatcgaggtggcggacgtcattaatattgaagatgaggacttaacaggtataggtcctcgaacggtttaccagctagcaaactggttcgaagtctcagtgtcgaagctaatgcagctggcagggctgaagcatgtggaggacgcgacactaacccaacagggccttcgattcgccgcgagatcgaactcgatggcatcgttgaccaaggaagagcgcgaagcactggatgaattcgtaaccggactgggcaaaaagtag

SEQ ID NO: 535273 - DNA, 936 bp, Stenotrophomonas maltophilia
atggcaaagaatgtcgtggtgtcgccgaggacggccgcagatatcgagcaacgtgtcgaccgtgtgatccgcggcctcggcaatcctgagcctccgttgaatctagacgacgtccgggagttgctccgattggaccgccggttctacaccgccgatgacaccagctcagtcggcgaggtggtcagcaaaatccgcgtggcttccaagcaagtcctcagtcgccctgggctgctctgggaggccatcaagaagctcgagctcaaggcgctctatatcccggaccgaaagcggatcctgctggacgcgacacttccgaaactcaaacatcgctggaacgaagcacacgagatcggtcacagcctcctgccgtggcatgaaagcgtaatgcacggagacgatgtgcatacgctttcgcgtgcctgccacgacatggtcgagagcgaggccaattacaccgcaggcaggctcctgttcttgcaagatcgatttgtggaggaggcaaggtcgacggcaccgagtctcagcattgtacgagacctcggaaaggcgttcggaaataccgccgccaccacgctttatcgctatgtggagtcgtgcggcgacgatgccgtcatgctcgcgatgatcacatgccatcctcatgcttcgatgcggccggatggcttcgatccgctagatccttgtaagtacgtcatccagtcgcgggcgttcgatgcgcgctttggcaacgtcagcgagatagaactgttcgcatgcatcgaggggtactgcgcgcctcgtcgcggcggccccctcggcagcgacgacgtggtgctgcgtgatcggaatggcgcgccgcacgtgttctcatttgagacgttctttaaccgatacgaagctcacaccttagctttccttcgtgggccaaggaacccgctagtctttgtcggcggctga

SEQ ID NO: 535274 - DNA, 237 bp, Stenotrophomonas maltophilia
atgaaggcatctcacacgtacgacgagaaaatcgggcaggcgcgcgagaccatcctgttgtggaatgaacaggctggcgcgttttcggaagaactcctacaggaggatctcaggattcccatagtggatcttccaaagcacctgattgagttgcgcaacaaactgctcgatgacgttgcgtctgcaacgcactggtcaaaacacatgaatcagctgctgaaggacctgacacgataa

SEQ ID NO: 535275 - DNA, 1050 bp, Stenotrophomonas maltophilia
atgagcatcacctgttcgcccccccccaccagagaggtccggcccgacgactcgcagcacatcgcagtggtgatcccgtgctatcgcgtccgcacgcataccctgcagttcatcgctggcatcggaccggaagtcggccggatcatcgccgtcgatgatgcttgtcccgaggcgagcggcgcctggattcgcgcacactgcaccgatccgcgcgtcatcgtggtccagcacgagcagaaccagggagtgggcggtgccacgctgaccggctaccaccacgcgctgcaggcatctgcccatgtggtggtcaaactcgatggcgacgggcaggtggatgccggtctgcttccccgctttgccaacccacttctgtccggtcacgcggactacgccaagggcaaccgtttccatcgcgtcggcttcgtgcgcggcatgccttgggtgcgcctggcaggcaatgcggcgctttcgttcatgaccaagctgtccagcggatactggcggatctctgatccgaccaacggctatacggcgatccgcagtgaagtactgtacgggctggagctcgaggggatcgcaaagcgctatttcttcgaatcggacctgctgtatcacctcaaccaagtgcgtgctgtggtgatcgatgtgccgatgcgcgccggctatgaaaacgagaccagcagcctgagcccgttacgcatccttggcccttgcctgctggggcatctgcgtattgcactgcgtcgccggttttacagctacggcatacgcagcttctcgcaggcccgcgtagaactgctgcttggcagcgttctactggctggcggcggcatatttggcctgtggtggcggtggtgcctctccgccgacagtggtgtaccggccactgcgggtaccgtgatgatcgccggcctgcccatcatcatgggcatgcagatgctgttgtcctggctcaatttcgatgaagccagcgaaccgctgcaacccgtgcttcgtctgcttggcgtcgaacaggacttgcgcagcgtgatcaggaaacctcggcaatga

SEQ ID NO: 535276 - DNA, 198 bp, Stenotrophomonas maltophilia
atgggcaggcgttctaaccgatcgctgtgggtctatgaggtcggccttgttgcgggtttggcactggtagctgcgttcatcacccggttcaatccggtggagacactccggctgggtggatggctgttcctcttgatgcaacccatcttgttgggtgctcatgctgtcgaccacttctcgcgtaagcgtcgtcgatag

SEQ ID NO: 535277 - DNA, 2016 bp, Stenotrophomonas maltophilia
atggctagaattcacgacgcagcagcacaagcattaagcgacaggccggacatcattgcaatgctggccacattcaaaagtgattttgatgtcacttgggcccgacgaatgagtctttatggaactcaagtctacgcaataatgctgcgcccggaaaagcatattcgaaccgccttcgggctcgagaacgagatattgatgatctatcatcaatattcctcaatccagcctcgagtgcttcacatcgcagaaaaaattctcagcgaaagcccctgtcaagggcgcgcagaaccgatggccttcattcttcttacatcgaccaacgacgcaggaaacgaagtaaggcgtcttctatccgactctggaaatcagcgggtcatcatcccattcgaggagatcgaatgcaggcggccaaatgatgagtacttcgtaaggaataggctctctgagttcttctattcgagagatctattcgacatgtcgcgccccctttcctcagatctctacttctttggacggcatgcctttgcactatccattcgagaccttttgaaatcaggagagaatgtcggccttttcggactaagaaggacaggaaaaacatctatcctatttagactaaagcgtctcatagaggatggcagcaagggtaaattaatatatttcgatttggaagatagcgcattatatcaactccggtggtgggagctgctctacaaaattgctacagccatttctcccaagaaaatttacgatcaattttctgagaccgacgcagcagagcgctttagaaagatcctcacaggaataaacaagaactcgaaagtcgtcatagcgttcgacgaaatagagcacattacccccggcgagcgattgagaatgcgcccgcactgggacacagattttattgaattttggaagacggttcgagcaatccaaaatgacaatcgacaggttagcttcatagtatgcggaacgaacgcagctccagttgaaaccgcgtcgttcgatcagcgtgacaacccactatttggcatggtgacgaagaagtacatgcctgcattcgaccgtgatgaagttaggcagatggtgaggacgctgggaagattcatgggaatgaatttcgaagagccttgctttgactatctgcttgcccgatatggcggccaccccttcatcaccaggcaagcctgcagcagaatatttgagaatcttaagctaacaaaaaagccggcactcatttcggctgcgacgctatcagcatcagaaccaactcgcgacctccatcttttctcatacgcggaaaacgtattaagcgtacttcaacgatggtacccccttgaatacgagatgcttgagtatctagcggaaaatgatatcgattcttatcgcagcattgaggattcagttccggacttgtctgctcacctccgtggatatgggctggtacgcaactccccgcccgaactgaccatgggattcttagccagctatcttcgcgggaagaagcagctggacaaaatatcgaatgcgaagtctatcgaaagcgagagctcatctgaatgcgaccccactgatccagatagcatcatcgcaagactaagcaagcttggatttcacagaaataaagttgaaatcaaacttagaaagttcatcaagcgagtattcatttcatcaaaaggcgtcgcacgctggatcgacccaatcctagcctcaataccttccgaaagacgagataagctacaaggcgttgataaagatgatattttaaaagaacacctatttctactcgacctccttaatatcgtgataaaaaattggagtgcattttctcaccttgaacagcagcccgtacagtcccggattacaaaggtgcagtttgaagtgcttattgacttcctaaacaagcacagagaagacgctcacgcaaaagaagtcaatgatacaacaatcgctgccgccgcccttgcagcaggcaccttagaagcagcaattgacccatacttagaagactaa

SEQ ID NO: 535278 - DNA, 387 bp, Stenotrophomonas maltophilia
atgactccgttggtcgccctccttgagcatccacgggcgttccccctcctctctgccggcgtgaaccgcaagacgggagagaccaacgctcgctacagccagcaattcgtggtggacttcggccgctacctgaaaggcttaggcgttgccaggggaatcggcttccgtgccttccgccatagcctcgctaccgatttggatgtcaacgatgttctgaagagggagattgcgctggtcaccggccacaacactgatccccgggatcgggtccaggtgctgcgcaagcactacctccacaagaaaccgaacgtgacccggagcaagcagatcagcgccatggagctgtatcggcccaaggtggaattgccgcgataccagaaggggtag

SEQ ID NO: 535279 - DNA, 1902 bp, Stenotrophomonas maltophilia
atggtatcgaccaagggtgatccgtcgccgaactgccctgccagctacaaggagcagagttatgacgccaacggatatccggatctggtccatgatttccaggacaatctgaccaacttcgactacagcgcacagggttacctgctgaagcgggtggaagcggtcgggagctcggccgaacgtacgacgttgcaggagtgggataccacgcgcaaccgactcctcaagacaacggtggtgggtgatcttgaagttgcctattcctatgacgatcgcggaaacgtggccagcgcaaccgagcgcaatctgacggcacgtggagtgcccagccagacgcgagtgacccgaagcacgtatacctatcacccaaacggattgaaggcctccatcaaagtcgatggaccgcttgcgcaggacgacgtcacctccgttttcaacagtcagggcgatctgaccagtgtcaccaacgcgcttggtcatacgatcagctattccaactacaacggactggggctgccggggcgcatcgtcaacgcgaacggtggtgtgcgagagttgacgtatgacggccgtggccgcgttgtgtccgacagaaccagttcgggaaccggctgggcgacgaccgccattggctacaccgctgcaggtgacatcgcctcgcttacccagcctgatggcttgacagtccgctacggctacgatgcagggcgccgcctgacgcaggaagtccgttcaatgggggacggcaagtgggcgtggacccgtcatagctacaacaacgcttccaatcgcacgcgcactgaggtttcacaaaccgactatccgatggattcgatggtgagcggcgtgattgacgaaatcactcatgatgcgcagtggaactggttcgtgcgtggctgggcctgttccactggctcggctgggtcaatccaggtggacggttacgccgacggcaacgtctacctgggtagcacacaagcaaaccttgccagcgagccaggagttgcagcggcttgccaagcatcagggagtgcctataggtatcagttgccgatatcgctagcccagaggcagcagttgggcggccgcaagttctccgtctacggccaatctccgcagggccgtggccaggaccgaccgctcgcgaactcaggcgtgtttgcgattccaacggcaaacatcgttggtgacatcggcggcgtgacccaggacggcaactggaacttcttcattgaaggctgggcctgctcagttggcgtggacgcctcgatcgacgtacacgtctatgccggtggcgcagctggtggcggtacattcgtcacttcgggccgcgccaacttggcgaccgacggaaacgttgccaacgcgtgccaggcacgcggaagtgcctattggttcaagattcctcttgacggcaacgtaagatcgaatcacgggggcaaagcactattcgtgcacggtatctcgcctgttggcggtccgaacctgaccatcaatcgctcgggcactttcaccgttccagccgttgtgcggagtgcggagttcgtttccttcaacgcctatcccaccaacatcaccaatggacggcaaagcacgttgaccatacaggtccgcaacacaggcaacgtcgtatgggacggaaacacctaccttgcatggggccaggaccagctggatcaatcccgagcactggctggtccagtatcccctggagggattgcatcgttcagcatcgacgttgcgccctaccacgatggcattgggatcaggagctttgcatacattgcccagatggcgaccagcggtatggcttggggaccccggccctacaccgtgatcgcggtagaaaacgcggattggtactgcccgccaaacagcaccacctgcgaggcgccgatgtga

SEQ ID NO: 535280 - DNA, 2592 bp, Stenotrophomonas maltophilia
atgtttcgccagctcgattatcaggagcgcgcactatcctccctcgacgcctaccttgaccttctgaaggagagtaaggtccgttccgacaaggtagccgcgctagcattacaggaccccgacctggggcttgccgtgccggatttcgccaaggaagggtgggaggcgttgagggcggctggcaagcttccagcttcccgcaacgcaattccgttctcgccacgtatggacggctgcggccaccctgtgcccaatgctgtgctgaaagtgccgactggtggcggtaagacgtggctcgccatatctgcagtatcgcgggtaatgggccgttatctcaatcgcaacactggcttcgtgctatggatcgtgccgaacgaggcgatttacacccaaacgctcaagcacctgaaagatcgtcagcacccctatcgacaggcgctcgaccgcgcggcagcgggccgagtaaaaataatggaaaagaccgaccgactcgatgcacgggacgtggaaaccagcctctgcgttatgctgctgatgttgcaatcggcgaatcgcgaaacgcaggattcgctgaagatgtttcaagataggggcgacgtgcatggtttctccccccccgaaggggagcaacaggcgcacacggccgctatcgaacggacaccaaatctatccgcctatgcgggcatcttcccgatggtaaaggactcccttggcaacgccctgcggatcatccgacctatcgtcgtcatggacgaaggccaccgagcagtgtctgacctcgcttttggcacactctacggtttcaacccctgcttcgtgctggaactcacggccacgccgcaggatgttcagccgcgcggtggccgcaatccgcgcgaaggccgctacgccaacgtgctggtggaagtaaccgggcgcgagctggatcgggagggcatgatcaaaatgccgctcaacctcgatccccggcaaggaaatgactggaaggcaacgttgaatgcggcggtcgccaaactgagcgcactcgatactgaagcccggaagttgcgcgccgagacggggcgctacattcggcccatcatgctgattcaggtagagcgcactggcgcggatcaacgggaaagccgctacatccacgccgaagacgtgaaagactggctcctgactgcgggcttcgaccaggccgaaatcgctattaaaacagcgcagcggaacgatctgagcgatcccgagaatcaggacctcttgtcaccaaccaaccgagtccgcgccatcattacgaagcaagcgctgcaagaaggctgggattgcccgtttgcctatgtgctatgcagcctcgcggctagctccaacctgaaggccatgacacagctcgttggtcgcgttcttcgacagcccaacgctctcaagaccggagtggaagcgctcgatgaatgccacatcattacccaccacgccgataccgcctcggttgtcggcgctatcaaggatggcctagaacaggacggacttggcgatctggtgctgcgcgtcacacaggatgacaagagcggagtaggcaagaccacccgttcgatcaagcgtcgcacagaattcgccaagacggacatctatctgcccaaggtgatgatcgtgcaagacggacaggcacgcgagctggactacgaaaccgacgtactttcgtccatcgattggcgcgacttcgacccgcagtcaatcgctgatcgagttcctgagaacgcacaggcggcggaaagccagcttcagcgaatcaggctcaccgatgacggtgacgagctctttatcggtgagaccttagccgcaaacgcagaaactctcgaattcgatcctgtccatgctgtcaggatgatctccgacatcgtgccaaatcccttcgtcgggcgcgaaattgtcggcgcaacagcaagtgcactaagggcccgaggctttgacgacggcaagctcggttgtctcgccagcctgatcgtggaagagttgcgcaagggcctggatgccgaacgcaacagacgtgccgaatccctgttcaaggccgaagtcacagcgggtcgcattcagttccggctgaggcttgatggcaacaactggcgaatgccgttcagtatcgaaactgcggagcccgggaacgcacgccaactattgaaccgagctggtggcccgctgggaaagagccttttcgcgccggtgtacgaaaacgaactcaatggcgacgagcgggatgtggcagtctacctcgatggagagacaactctgtgctggtggcatcgcaacgtcgctcggacacagtacggcattcaaggctggaagaaggcaaaaatctacccagatttcatcttcgccgtgcagcgcgacggcgaagctaggcacatcaccgtacttgaaactaagggcgatcagctcgacaatctcgacacggcctacaagcgtgaaacactctctttcctatcggacaatttccaatgggatgagactacaccggtcggcgaactggaattgatcaacaatggcgaaaccgttggaggaacactaattctgattagcgagtggcaggtgaaactcccctcccacctatga

SEQ ID NO: 535281 - DNA, 1806 bp, Stenotrophomonas maltophilia
atgactgacctgagtttcaaaggcaaagagttcgtttacaaccaccatcttgccgtccccttccgtccgctcgtgcctcaccccaggaagggcataggtccagtcgcgctcgacggcaatttggtcatccaaggcgataacctgcacgcgctgaaagctctgctgccgctgtatgccggcaaggtggactgcatcttcatagacccgccgtacaacaccggcaatgagggctggtgttacaacgacaatgtcaactccccgatgatccgcgaatggctggaatccaaccccatcggcattgaggacggcctgcgtcatgataaatggtgcgccatgatgtggccaaggctcagactactccacgaactactggcggaggatggcagcctttgggtgacactggatgataatgaggcacagcgcggaaaactcatgctggacgagatttttggcgacaattgctttgtcaccaatatagtttggcaagcgcgttattccgtttccaatgatacggacgtctcacgatcgcacaatcatattcttgtctactccaagcaaaaagaaacttggaagaaattgcgaaacgagcttccccgggacgaaactcaaacgaaacaatattccaacaacgacaatgacccaaatggtccttggcgcgctgtcccttgggatgcgccgaatatccgagagaacctttcatatccgattacgacaccctcaggcgctgtacgatatccgccaccaggcagatgctgggcccgcgaagaggacaagtggaaggagatcgttgcggcggggctggattactacggcaagaacggtgatggcgctccctcctacaaacgatatctgaaagacgccggcacggtcgtaccgactacgtggtggccacatagcaactccggccatactgacgaagcgagcaaagagcttgccgcgttcaatttggatgtcccgtttcagacgccaaaaccactgcggctgcttgagaagattctggccatcgccacccgtcctgatagcttagttctggatagctttgcgggatccggaacaaccgctcacgcgacgctgtccctcaatcaacgggacgggggcaatcggcagttcatcctcgtccaacttgatgaagaagacggaaaggcgaatgccgacaacctgacggcagagcgcgtccgacgcgtcatcaacggttacgaattccaaggcacgcaaaaggccgaattgctgcgggagcgcctgacctggcgatccatcagcaacagcagcgatctagttcacaaggttgaggccatcgagactctatgcggccacgagtacgaccgcatcaagaaggaggtgaaggacggtgaactgattctcaccggtgagaagtccgtgtcgaggcgcgtggaagggatcgccgggaccttcacgtattgcacacttggcgatccggttgagctggacaagatcttgagcggcaaaaccctgcctgactactccggccttggttcggcgttgttccacatggcaaccagccaagcgctcattccttctaccacccgaaaggatgatttctatctcggcgaaaccgagggtcaacatgtgtggctgatctacaaacccgatatcgactggctgaagtcgccggaggcagcgctcacgttggctcgagccaaagcgttcgcgagcagcgatccgggcaagcgacatcttgtatttgcgccagcgcgctttgtgagccagaagatgcttgcggaacagaacatccccgtggattttgtgccgcttcccttcgcactctaccgcattgaccggagctga

SEQ ID NO: 535282 - DNA, 1428 bp, Stenotrophomonas maltophilia
atgactaccaccgatcacagcgacgacaccccactccaatctgccgtcgcaagctaccaaccggaccgccagctgatcaccttctccgaaaggatgatggtcgcccccaagacggtcaccgatgcagctccgggcggcttccaagatccccgtagcattgcgtacttcttccacgaatggatgcattacctgcacaacgtttccacgatccatggcgtcagcgcattcctgggccttgccgaactatggggcgcgtttcgctacaccaccgacaccagcggcatcggccagggtcggattgatggtgcgaccctggaacagttacggacggaagagctgcttacccaccgaaggagcctgcggcgccgcacccaagcccgtcttccggagggaacccggcctgaccaggttgatatcctggcgctgacggacgccacacccgatggtcagcccaataatgaccatctcacacttcacgcgcagtattccaatactgcaggggacacggccagagcggacatcacaatcgggccaggcgagatcctcgagtcggttgcatatctgcttgagaagcgattcctttggaaaatggcagcgcaggaaccggaaccggccgccgtccttccctatcacgcgctgtccttgctggcgcagaagatcgccccggacctaaacgaagagcaggtgctgctgtgcgggctcgcaagcctgcaatccacctcgcctgtcgacgcgctgctctcccatcttcgcggcagcacgaccgcttcgtcggagcagctcaagcactggcgcacgcatcttggcgcccaagtcagccagcatctgcggtgcaacgaaccggtcagccgcgcatggctggatcgcctccaggcgatgttccccgtgccccaaaatctcggtcttgcggctcaggagacgatcgctttcatgcgtagcaacctgcaggcgcgcctggcggatcccttctttgaacttggcatcattgatgtactgtgcgcgcctgatgcgctcccgttcggtgagcggatgaatgcactgatgaccaagcatggcatctgctctctcatgcagcagcatcccgggaccatcttccagatcggacgggacactctgcacgactttgccgtggccggaagaaatgcggagttgaacgaaggacgacggatcctgcaggcatcgttcgaattcatgctgaggcatctctcccaagggggagcattcgtggcaactgcggacacccccccatgtcgatgccccttcttcacctcatgcgtggatccggcacgtgcgcagcacgaagagcgctgcaacaccacgccatggcagatcgtcgatcagcaggacgctagctgcttttatgccctaggtatcgtcaacctgcgctcggatccaccgccccaaacggctaccagcttggtcgcataa

SEQ ID NO: 535283 - DNA, 837 bp, Stenotrophomonas maltophilia
atgcccaatctggacctgccagaccgctactaccgtggcacggggggctacttgaccgatgcgtacgagtgcccggcgggaacggccgagttcgtggtcgatgtatctctggcaggcctgacctatgtgcgcgacatcgtctatgacggcatggtgtgggcagcctacgggttcagcgatcgctcgccgttgattggcatggtgtaccagctgactggcagctcaaaccaaccattgcaccctgggcagcgcatcacccttgatgcttccgttacgagcaacggcaagatgaatgctggtgtgatcatccggtacttctttcgagggggcgccatggaaagcgcgccctacaggtatctcggcacagtcgaagcttggccggtgagcgatcccagtcaacgcctgctttcgccaatctcgctgggatttaccgtcccccccgtcacctgcacgctcgccaacgcctcccacaccctcgacgacgttcttgccaacgaactcgccgccagcggcagcaacgcgaaggaatccagcttcgacgtcgcgatgaactgcccgatggacaacatcgacgtgcagctgtcgctggccgacgccaatgaccctggcagcagcaatggccaactcgcaccggctccaggtaccaccgctggcggtgtacaggtgcagctgctgcgcggtggccagccggtgcagttcggccaggcgtggtcgcacggctggtccagcaagggccagcaggccattccgttcagcgcacgctatctgcgcacacccgatccgctggtgcccggcgacgtcaagggtgaggcggtgctgaccgctgactaccgatga

SEQ ID NO: 535284 - DNA, 324 bp, Stenotrophomonas maltophilia
atgcaggcgtggcccgccgcagcgaccgattccccgcgcccgacggcggaggtgggctacagccctttgctggacctgttcaacctgctcgacaacctgccggattggttgccgggatacacctcgtcgctctacaagaacgcctggcagcagcgctttggtctggacgaacgggaccccgcactgttcggcgcctacgcaggcttccgccggcgcacttctgccttggcacaggatcatgaggctacggccgtgcttgtcgaccggctgttcgctggcgcagagaagagcccctggcgatctactggggcagtatcggtttga

SEQ ID NO: 535285 - DNA, 768 bp, Stenotrophomonas maltophilia
atgagcattaaatttggcgcgaagttcgctattgtttcagtgatatcagcaggtcttttaattgcttgtgggccgccggcggagcaggtagctagcaaggctgagctgcgtcccagtgattctgggtctggatctgaaaaattgcttggggagagcgggaactctactttcaagtgggatggtgactcttcactatctgcggagcaacgtgaatatttgaccgatctctcgatccgatacaatggaattttcgcaggtctggagggaaggtcgatgcgtgaggtagaggctttgggtttcccctctgccaaagaatggttggacgcgaaaaatctcacggacgatgagcttctcaatagggctcgacagggggatgttaaggcgaaagccttttatgtcgatagggggatgtttaagcttgagagcttggtgtcatcttctggagctgaaaatattagtgaggttttccaggcttcgcccgctgctcgtgatgaatatcagaaattggcgattgatacacaggtttctgctgccgagattctcaaatttcatcccagccccttcgctgcatacttgtttggacggaccagcgctgtgactggcgggatggaattccctattgccgcttcaatcgcagttgccggtgatttgggtgacgagaggtcggccgcattgctccaagcttattcgagcaaggtcggggcaatggacccgggtgctgtaatgagtagctataacagtatgcgcagtattgcgggattgaaataa

SEQ ID NO: 535286 - DNA, 255 bp, Stenotrophomonas maltophilia
atgtgtgaggcgcagctgctgcagccgacgatcgacgccctgaaggcccagcgcacccataccgccaccgtcgacggattcgtcccccacgaccccaggagcagttccacgctcagcgtcggcgacaacgtgatgtgggtgacccggcagatggagcaccgggactggacgatcacagccaagaagtatggccgatggtcccatcgatggttcccgacgccggcgccagggcggcggctatctgggatccgctga

SEQ ID NO: 535287 - DNA, 531 bp, Stenotrophomonas maltophilia
atggcaaccaagaaagctgcgaagaagaagcccgccgccaagaaagcggtgaagaaggtcgcgaagaaggctgctgccaagaaggcagtgaagaaggtcgcgaagaaggcgaccgccaagaaggcagtgaagaaggctgcgaagaaggtcgccaagaagaccactgcgaagaaggcagtgaagaaggcggcgaagaaggtagccaagaagtccactgccaagaaggccgtcaagaagaccgccaagaaggccgccaagaaggccgtcaagaaggtagccaagaaggccaccaagaagactgccaagaaggcaacggcccgcaagccggccaagaaggtcgcgaagaaggcgactgccaagaaggccgtcaagaagaccgccaagaaggcagtaaagaagaccgcgaagaaggccaccaagaaggctgccccgaagaaggcagcgaagaaggttgccaagcgcaagccggccgcccgcaagaagaaggccgctccggtcgctctgccggcaaccccggcgccgctgatctaa

SEQ ID NO: 535288 - DNA, 477 bp, Stenotrophomonas maltophilia
atgcggaatcggatgctgatgatcttgttgatgggcagtctcgctggctgttctcccagcgaggaggagcttgaagaagagaagactgaggcaatcagagccgcagttgaggcgggtgttcgcaaggcattgaaggatcctgattcggcaaggatcacggtccgccaagtattcgcactctatgacggtacggtcgcttgcggaactgtgaatgcaaagaacagcttcggcggctatacgggcgagatgaaattcgacatcggcatcaaccctgatagaagccccgccgcgccaaccattgcgaatgatgagatgagcaatgcggtgttcgcagccatgtgcgatttccagaaggaatatgctgcgcgcccgggaaatgccgggaaaccctcaacgccagaccagaggaagctgctcatcactgcgtatgaaaagcgggtgcgagaggtagttcaagaagtggcctccaaaaggtag

SEQ ID NO: 535289 - DNA, 387 bp, Stenotrophomonas maltophilia
atgcacggaatgactcaacacctcgggatggcaacagccgggatcacacttctgctgctggctgcctgcacatccgttggcggcatgcgaagtactggacctgcagcagctttctcgtccagtcaggagcccttggctgccgctacttgtgtccgcgatgcctggggagaggtgagcatcggaggatcgcggtggcagtacgtgattgagccccgtacagatggctactccgtatcgacctccaatggcggggtcccggcggagtttgttgagatcaccccccagactggaggcgggagcgagatcaagttctacagcaagttcctgaagcgtcggcaggctcgctacatcgaggccgtcaccctatgtggtgtccgctcggagtag

SEQ ID NO: 535290 - DNA, 762 bp, Stenotrophomonas maltophilia
atggacgaactcatggatgccgttgcagccttggtctgtctgatgtcgcccgaaaaagtgcaggccgttgccacccgcgttcgtcgaaccgaggctaacaaggctgcgacgttgttgccgagcgtggtgggaacccaggttgccagcgcggtggtcgagcaacttgcagccgcgtggcaaaagacaaatgtccgctcagacgagctcgcactgatgcttcttgctgccggccacgtctataccaaagtctcttcggagcaatgcaccgaactcgtgtggacaggtccaacgacaccattcgtatcggcgcgccgaacagagcaggcgcttctgcaggtcatcaattccgctcaacagtcgttgtttatcactagcttcgtggcctatgacgtatcgactatcgtcaaggccctgaacgtggcaaatgatcgcggggttgtcatctcaatgctgctcgaaatgtccaaggaacacggcggcagcatcacgttcgatgctattggcaagatgaggacgctggttccgttcgccagactctacgcttggcgtgataagtctgatccgttttctgacggtcgtgttcacgccaaaattgcaattgccgatggcagaatgtgtttcatcaccagtgcgaacttaactgggtatgctatggagaagaacatggaagctggtgtcttgatttccggcggggatatttcgaagctacttgatgagcacctacgctcactcgtcggcatgggcattgtttcgccagtatga

SEQ ID NO: 535291 - DNA, 1860 bp, Stenotrophomonas maltophilia
atgatcatcaacaacaaaactccagttggcgaggtacgcccaagccaattgttgtggacttatggccccggcgcgctgatcgatctgcccagcctttccgtagtgacacttggcatcgaccgatgggaaaaggatcgctgccagccagttcaagaggcgcggctgcttgctgccgttcggatgattctggggtcgcaggtcgaaaacctacggatgcctccgttccggaaaagcgcgctcgttgacgtctggtctgccgaagccaacatcggcgttcccgtacggccattcccgcgctggatgcgctgcgtgaaatgcggcctgctgtctcccttcgatgtcggtctgttcgagatcaaggagaatcgcttcaggccggaacgaacacgtttcgtgcacaagggctgtcgtggctccaagggcgaccaatctgccaaggatgcggacgccgtccccgcacgtttcctgttggcatgccgcgacgggcacctcgacgattttccgtggcgctacttcgtccatggcggcagcagttcatgcaagggcaccctgcgcttcttcgagagcggcgcatcactgcagactgaaaacctgtgggtgaagtgtgatgcctgtgaggcctcccgaagcatggcgcacgcctttggcaagtcgggaaaagagaatctgccgggttgccgagggcgacatccccaccttgaccacttcgatcatgaatgtgatgaggaagcgcgggcggttctgctgggggccacgaatagctggttccccatcacgctatcggcgctcgcgattccacaggctaaagactcgcttagtcagctgatccgggatggctgggagttctttgaagatcttgattccgaagccgaggtgtcggtgacagtgaagacactgaagaagaccggggcgcttcctgggatcgacaaatatgctgcagccgccatctggacggccatagaggcgcgccgaaaaggcggagggcaggaggccgtgggtgaaaccgacattaaggggcctgagtgggatgtgttgattgaagccaacccgccctcggattacccgcacttcatgagcaagaaggtggacactccgcccagtctcagagtccatatcagccgagtcctgctcctcgaacgtttacgcgaggtgaatgcactgctgggtttcacgcgagtcgaggcaccggaagaatccggcgatcccgatgagcggccacagatggcgagcctgtcacgcagcaagccagattgggtgcctgccaaccaagttcacggtgaagggatcttcatccagttcgacgaggctgccctcagtaagtgggaagctctggacggcgttaagagggttgacaggatgctccgtggtggtcataggggatggtgcaattcgcgtcatcttgacccgaacgaaggctaccccggcattcgctatgcgatgctgcacacgctctctcatctactgatccgcgagctggcgctggaatgcggatacaacgctgcgagcattcgtgagcggatctacgccgacacatcaggcgatcgccagcaggcaggtattctcatctacacggcagcagccgattctgacggcacgctgggcggcctcgtcgatcttggcaagccaggaaatcttggccgcttgctggaacaggcgttgaatcgctcgaaggtctgttcctctgacccgctctgttcggaacatgatccggagaaagatcgctccctacatggtgctgcctgccatgcgtgcagtttggtggcagagacctcttgtgagcgaggcaatcgctacctagaccgatcgctgctcataccgacactcgagcgcgccgacgctgctttcttcaagggcttctga

SEQ ID NO: 535292 - DNA, 4005 bp, Stenotrophomonas maltophilia
atgacaactgacaaatcgaccaaatcacccaatgcatggatcgccattgatcatggccttgctgctgatcccacgctggcaccgtacacgttacggctgaaaggcgagcgatcgctatatcaagccatcacggatgacgactgggtattgatcttgagctccgccggtcacgtcatgcgggtaggtcgagtgctgcgggtgcgttccgatctggagatcaccacgatctacttcgaccgcatgctgcggattgatccggcggtttcgagtggtcttacgtcgctccccccaccatcctccggccgcgttggccgtattcaatggacggatcttctggagtcgctccccaaggcattgcacatgaccatcgctgaagtgccgaccatcgaggatcaggcctatatccgcgaactgctgcaactggccgtgatggacgacctgctcggccccgctggcggcccccgtgaacgtatagccgacatgggtgtgcgcgaccgctacctggttggcaaactggccccgcgtgaggccgcacagggcggcatcgagggtctggacgggccactggccaatgacgacgcagaagagcccaccgaggccaaggctcccggacgccacgaacccggtgcggagtttggaacggccaccgggcgtgtggagccggagtcggattcggccgacgaaatcgatgccgccagcaaccagtcgctggtgcccagtagcctcggcatgaccttctgcgtggatggtgacgccgaccggatcgagatcgaagcgcgctggggtcggtatgagcgtagtgacgagcacgagatgttccgcacccgcaagaataaggaaaccggtgcggaagtgcagaccaaggccaaggtgtggcaacgcattccctgtggcggcaagatcgtgttaccgctgatcgaaggtgtgattccacatcaggcacccgacagcgagtttcctgaagtgcgcgtgcagggttccattcgggccaagaacgccaatggagatcggttggtcactttgttcctggtgaacgcacaggaagagccggacaccaaccgagacacggcgtgggtgttccagcccgaattgatcgctcgttcggcgcaggatgccgccaagcgcgccatcttccggcgcaggccggtgctggacgccgacggcatggaccccgagcgcgaagcgctggagatgatttaccgaaatcgcgtcgaattcgccgtgggccatggcgttgcggtccatgccgaaactgcagacgacgtgatgctggcgaccgaggtgcgcaccacggtgatgccgcagtacgaggtgcaggtgacggagacgcccgggcttgatccacgggatcgcccggcgatgcgcgagatggtcagtagcggtctgctcgatatgcagcgattggcgacgttggacatcgacccactggccgacgccttgagcacgctgagcaaggattacgccgcgtggattgatgaacagcgcgcacgcgtcggtgccgaagtgaccggctacgacactcagtcccaacaagcgatggaccgttgccaggagatccacacacgcctgcagcagggtatcgacacgctgaagagcaatgagaaggcgctggccgcgttccggttttccaaccgagcgatggccacgcaacgcgtgcgcagccagtatgcgctggccatgcgccgaggcgaggatgtcaccatcgacaaattcgatttgttgaagaatcgcagctggcgtccattccagttggcgtttctgctgctctcgatcccgtcgctggcagatccgaaccacccggatcgagttgagccggtagaggcctatgccgatctgctgtggttccccaccggtggcggcaagaccgaagcctatctgggcgtggcggccttcaccatggccatccggcgcatgcagggcaatctcggcgggtttgacagctcgcgtggtttggccgtgatcatgcgttacacgctgcgcctgctgacactgcagcaattccagcgtgccaccgcattgatctgcgcgatggaggtgctgcgacgcgagatgctggacaatggtgacaaatccctcggcacggaacctttcaccatcggcctctgggttggcaacaaggtgacgccggggacgaccgaggacagccaccgcgccattgaggacgtgcgtaaccccggcaaatacaacgccggagcggcatcgcccgcgcagctcaccagctgcccatggtgcggctcggaagtggcccctgggcgcgacgtcgaggtcgacaaaggctctggccgcaccttcgtctattgtggagacaagaaaggccgctgcaatttctccaagggcaaatccagtaagcagccgcatccgggaattccggtgttggtcgtggacgaagagatctaccaccgtccaccgacgatgatgatcgcaacggtcgataagttcgccatgatggcgtggcgtggcgaggtgcgcacgctgtttggtcgcgtgggacgggaatgcgagcgccacggcctgctttggcaaggtgccgattgcaatggcaatcaccaagcaggcaagggcctcccttcctcgaaggtgaagaccatcagcccgattcgcccgccagacttgatcattcaggatgagttccacttgatcagcgggccgctgggcaccatggtgggtctgtatgagacggccgtggatgagctgtgtggctggggtcttgatggcaagatggtcaagccgaagatcattgcctctacggcgacggtgcgcaaagccaaagagcaagtgaacaacgtctttatgcggcgtgtttcggtgtttccgccgcatgggttggacgtggaagacaatttcttctcggtgcaacgctcgatcgaagaaaagcctgggaggcgctacctaggcgtgtgttcgcccggtagctcacgtcccgcgatgctgatccgcgtctacactgcgttccttacggcggctcaggaactgttcgatcactttggcgagcctgctgacccatatatgaccatggtcggctatttcaactcgctgcgtgagttgggaggtatgaagcggctggcagaggacgatgtgcagacgcgttcctaccgcgtggagatgagtatggtggaacggcccggactggcacaacgtagcatcagcaacattcgcgagctgacatcacgggtatcgagtcaggatattcccaagtacctcgacaacctggaggtcaagttcaagtctgagttcgacacggctacgggcacgtatgtcactcgctggcagaaaggtgatgtacgcgccattgatgtggtgctagcgacgaacatgctgtcagtgggtgtcgacgtgaaccgactaggcctaatggccgtgaacggacaacctaagggaaccgccgaatacattcaggccacaagtcgagtcgggcgctccttcccaggcttggtctgcacggtgctgacatgggccaggccgcgtgacctgtcgcactacgaaaccttcgaacattaccacgctacgttctacaagcacgtcgaggcgcaatcggtaacgccattctcgccacgcgcaatggaccgtggtctgacaggctcattgttgagtctgatgcgtctggaaaacgacaaattcagcccaaacgaaggtgctggccaactgagtatgtccaatcaagccgagatcgtcgatgccattaatgtgttggcgagtcgagcgggcaatgtcgctgaagacaacgcgcgcaagcagttggctcaaactgaattgaaagagcgtgctgacgaatgggcaaaagaagctagcaagggcgggcgaatcttggcctatgaaaagcggggcaccgagaaagacaagactgtggcattgatcaagtcgcccggccttcaagcttgggacaactggaccgtaccgatgtcgatgcgagaggtcgagcccggcgtgcgtctgatcatgaacacgagttacatcacggacgataacgattggaaggctcgtccagcaacgaaggatcaggattga

SEQ ID NO: 535293 - DNA, 576 bp, Stenotrophomonas maltophilia
atgatccacgactatcagattctgatcaacatcgtcgtgcatggcgacatatggcctgcccacgaagtgctgctgcaagagcatcgcttgcgtgaggacgacttcattggcctggcaaatcagtccccaatcgtgccacgaggccgagagcgcctattcggcaaggcgctctatgctggctttgaccgcgatttcaccgtgtccatgcatctgctcgcgccccagatagagcacatggttcggttccacctaaagaatgccggggtgaaaaccaccaatctcgacattgatggcattgagaacgaaaacggcttgagcacgttgatgggtctgccagaaacggaagcggtattcgggaaagacttgtcctttgagatcaaggcgctgttctgcgatgccttgggaccgaatttgcgtaacgaattggcgcacggtctcttggatgatgattcatttcagtcgattcatgcgatttatgcgtggtggatggggttgagactggtcttcaatacattctggaatgcagcgcggaaagccgaacgcgacaagggtgtggaggaaaataatgacaactga

SEQ ID NO: 535294 - DNA, 4260 bp, Stenotrophomonas maltophilia
gtgagccaagacaaccatcacgattggctgtcgttgatcgaaatctccggccctttcctcgccgttccagttctgaaggaagccttgccacaaggcctggaagaacttgatgccaccaagcgcaaacggctgcgcctagcctacgaggaatggcgcgaagcgctggagctggacgacccgcagttcaacgagttgcacagtgcgtggatcgacgaggtgctgtcgcgtggccttgggatcgacgaagacggcaaaggcgacgtcctcaagcgcgccgactggtgcgccgccaaccttcaagccagcttgcccgagcacggtgtgacgctgtcgccggatcttgcggtcatcgatgagcaacgcgccaacaaaccactgctgttgattcaagcctattcgcaggatgtcgatcttgatgccactctgaagcaagacggctgggccgccacacccgccgatcgcatggttgctttgtgccgttcgctgggttgtcgcctcggactggtgaccaacggcgagcgttggatgctggtggatgccccggtgggtgccgtcaccacctttgccagttggtatgcccgcatctggagtcaggagcccaccaccctgcagggcttcgtgcacctgctcggcattcgtcgtttctttgtcgacgaaaccgaacaactgccagcactgctcgatcgctccctgaagttccaggatgaagtcacagacgccttgggcgagcaagtacgccgcgccgtcgaagtgttgattcagactctcgacaaagccgatcaggaccgcaatcgagagctcctgcacgacgtcaaggaacccgagctgtatgaggcagcgctgacggtgatgatgcgcttggtgttcctgctctcagcagaggaacgcgatctgctcctgatgggcgacgaacgctacgaaaccaactacgcgctctctacgttgcgcatgcagttgcgcaaagagtccgaggagatccttgagcgccgctgggacgcctggtcgcgtttgctagcagttttccgcgcagtatttggtggcattgagcacgagaacctgcggctgccagcgttgggtggttcgctgttcgatcccgaccgcttccccttcctcgaaggtcgagccaagggctcgaactggcgcagctatgccgccaagccactgcccatcgacaaccgcaccgtgctgctgttgctggaggccattcagcaattccaggggcgcacgctttcttaccgcgcgctagatgtcgaacagatcggctacgtgtatgaaggtctgctcgaacgcaccgtcaaacgcactgatgaagtcacgctggaactggatgccaccaagaatgccaagacaccatgggtcaagctggccgaactggattcggctcgcttggatggtgcctcgcgacttgccgagttgctgcaagagcgctccggtagttccaccagccgggtgcgcaatgatctggcgaaacccgtcgacgacaccttggccgatcgcctgctgaccgcttgccaaggcgacaccaagctgcgcgatcgcgtcaaaccctatgcccatctgctgcgcaccgatccatggggctatccgctggtgtatcccgctggtgccttcatcgtcaccaccggttccgaccggcgtgaaaccggcacccactacaccccgaaatcactcaccgaagcgatcgtcaccgagaccctcatgccggtggcctatgtcggcccagcagagggaacgccgcgcgatcaatgggtgctgaaatcccccgccgaactactcgacctcaaaatctgcgaccccgccatgggctcgggcgctttcctggtgcaagcctgccgctggatgtctgatcgcctcgtcgagtcatggtcacaagttgaaaccttgggcaaaaccgtgagtgtggatggtgaagttctggatgtaggatcggcaaaagaacctctgccgcgcgacaccgaggtccgcaccgtaatcgcgcgccgtctcatcgctgagcgatgcctgtacggggtcgatttgaacccgcttgcagtcgaactggccaagctctcaatctggctggtgacgctggccaagggccgcccctttggcttccttgatcacaacttgcggtgtggtgacagtttattgggcatccatcggctggatcagctcaccgaactgagcatgaccccggagcggaagggcgaacgaagtggccatctgttcggccagaacattgagaaagcggtactcgatgcaatcgaacttcgtcaacgtttgcgcgagatgccgatacgtgacattcatgatgtagaggctatggccagattggatgcggagtcccgtctttgccttgaagtgcctgaacagattgcagatgcatttatcggggaattgttcacatcaagtggtaacggcgccaccttggaaaatgcaattgcatccctaaccatcatggcaggacaggctattgatggcgataaagacgcaattgcatcaatcagtcggcgcgcggccacctcgctcgcggccgacacttcgaccaataggtccaggcgcagacctttccattggccactggaatttcctgaagtttttcaaataagagacggctttgactccatagtcggaaatcctccatacctgtggggtatgagggtttctacagcacttgggagcaattacctcaaatatctagagacgcttgccgattcgactttgggggctgcggatctctgcgttcattttcttttgcgatcagcttcattatcttctccctccgcaacatttggtcttgttcttgttgacactatttcacagggtgacaccagagaagtaggattggcgaaacttatatgtgaacacacaaaaataatttggtcccagccaagcctcaaatggcccggtgcggcatcggtaaagatttctccgctagtgataaaaaaaggaggctgggaatctacatgcaaattgaacggggagtttgtcgaaaccatcaactcacggctctcggcgcaaaccgaagagcagccgccgcatagcctcaaggcgaaccaaggtttgtcttttgtgggtcactaccttatgggggcaggcttctccttgaacgggcaagagcgttctgagctgctgcgcgtggagcctatctctcaggaaatcatcactgactatctgcgtggtgaagatatcaatcagaggccgagtcaaaatccatcttcatttgcaattaactttagtgggctggacttgcagtcgtgcgaaaaccgctaccctaaggcggttgagcggattagggcgctagttaagccccaaagagatgtccaaaagcggaaagcgaatcgggagcgctggtggctttatgctgaacagcgacccggattaacatctgcgatcgccaatctagagcaagttattgttcagccatcgcctagcaaatacctatccttctctcttgtgtcggcgagaatggtttttgcctctccaatggtcgttattgcatcaagtgaaattggtgtgctcggggtgctgcatagcactatccacgatgcttgggtgcgaaagtattcgtcgacgatgggcgatacgctccgatatacgtcttctgattcctttgatacgtttccttttcccccgattacaacggaaattcaaacggcatcggaagagttttataaacttcgacaatcattgatgcgtgatttgaatgttggggtgactgcgctgctcaacatgatgaacagtcgggatgaatcatcccctcagatcctctcgttacgatccaaatattgtgaactaaattcggcagtcattaatgcttatctgtggtcagatcttccgctcgcccatgattttcaggatggtcgtatgggaggtcagtactcggtatctgaatgtgctcacagacagatacttcaaagacttttggagcttaattatcgcctccacgaacaaggggtatccgaagatttggatattttggcggcaacaaacggagggcgtagaaggcggactcaagtaaacatctcaatacaaggaggtctcgatttcggtgacttagaggtatctgataggtgcagggcgccgagcccacgagatatcctcctttcgcatcttggctcgcaagccggatggcatgccaagagcgatattttagcggcgacgggcatctccgatggccaatggaatggagggatcagtgaactagtcgcggaaggaaaaatcgagcgtcaaggagaaagacgcggtgcaaggtatcgatattcagggggtgacaaatga

SEQ ID NO: 535295 - DNA, 2025 bp, Stenotrophomonas maltophilia
atgagtcgtggagttcgctacacgctttgcgcgttcttgagcgcagatgaagccctattgcttggcgagctcaccgactcagtcgcctcgacaggcattcagagcacacgcacgactcagatcgagacctggaagtcccagattgcgcttttgaggcgttgcgcagacgaactgatcggacggcgtgaggctgccaaggaatggcacttggtcctggagtacgagctaccacgtcgacagaagcgtccggatgcagtcttgcttgccgaggacgtgatcctggtggtcgagttcaaggtcggcgctccgtctcacaatgcgtcggcccgttggcaagtagaagactattgcttgaaccttcgtgatttccacgccggtagcatcgggcgcgcgatcgtgccggtgctttgcgccacgtccgcgccaagtgccaaggattcgagagccccgacttcgagttcatgtgttgcaccaatacggctcgccaatgccagcgatctgaccgcagtgctgttgtctgcctactcggcgcaacacgatcctgaccgaccgcccattgatgtcgattcctgggtcggtgcaccgtatcgccccacgctgtcggtcatcgaagcggccgaacgactctacgaaaaccacgacgttcgcgagatcagccacagctacgccagcaacctggacgccacgacggacctgttggcggatgtaatcagagaggcgagaacgttaaaccgacgctatgtgtgcttcgtcaccggtgtgccgggggccggcaagacactgaccgggctcaatgtcgttcacgatccctctttgcgtactgagagcgccccttcagggattttcttgtctggcaacggcccgctagtcaaggtcgtgcgtgaagccttggtctggagtcagcagcgcgccgggcgtcggcgccaggatagtgcccacgaggtctcgaccttcatccagaatgtccaccagttcttgcgttaccaccgtgagaaccccgcggaactcccgcacgagcatgtcgtcatcttcgatgaagcccaacgcgcatgggaccgtgagcagatgctacgcaagcaaggcgtggacatgtctgaggccgccgaactcttcgacgtaatggatcgattggacggatgggccgtgatcatcgccctggttggcggcgggcaagaaatcttcctcggcgaggcaggattagaggaatgggggcgtgccgccgctactcggccgcattggcgagtcgttgcctctcccgaggttgtatccggtggtgccagcgtatctgggcaccgcttgtttggcgaaggcgttcctccaggcattgagtttcggccggagcccctggctcacctgagcgtcggggtacggagctttcgggctcaacggctggcggaatgggttgatgccgtgctcacccttgatgcagagcgggcgcggtcactcctacccgattgcagggagttcccactcaatttcacacgtagtctcgacgccgccaaggcgtggttgcgggccaggagcgaaccggaagacggacagcgtgccggtttgatcgccacgtcagaggaccaacgtctacgggcctatggcctagagcggtccagcgcttttcgactggattactcgttcgagaagtggttcctcatgcctccaacggatgttcgttcaagtcatgcactcgaagttgcggcgtccgagttcgaatgccaagggctcgagctcgactgggtggggctgtgctggggcggagacttgaccccctccaacccggacggctgggaatacagaaagtttcgcggcagcatgtggcaacaggtacgcagcgatgccgagcgaacctttgtacgcaatcgttatcgcgttctgctcacccgtgcacggctcggcttggtcatctggattccacctggcaacacagacgaccccaccctggacccggccagattcgaccgtaccgctcaactctttcaggccgctggcgtgcccgagttacaacaagaattcgaaggagctcacccgtga

SEQ ID NO: 535296 - DNA, 2955 bp, Stenotrophomonas maltophilia
ttgggtgaagagctagaagtcatctgggagattgagccaggtgcgcaagtcattgagcgtgcgggttttccctcaatcaccggtcaggatgcttccgacgtccttgaggcgtttcttaacgcagtgcgctggggtgccgcaaccaacgcggatagaggctttttgcaagcgccgtttcgcagcggcgtcagcatcgaagacttccagcttgatcccttggtgcgcgccatcgacatggcccgcgtcaatctactcatcgctgacgacgtcggcttgggcaagaccattgaggctggcctcgtcatccaggagatgttgctgcggcaccgtgcccgcactgtcctgattgtttgccctgcttctctgcaggagaagtggcgtgtggagatgctggagaagttcggcctcgatttcagagttgtcgacacggcctacatcaagcaattgcgccgagagcgaggcatccacgctaatccgtggacgtcgcatccgcgcctaatcgcctccatggactgggtcaagagcggcgaaggactacgcgccatgcgcgatgttctgccagcacacaccagctatccacgcaaattcgacatgctcgtcgtcgacgaagcgcacaacatcgctcccgctgccggtgcgaactacgcgcttgagagccagcggacgcgcttcattcgcttgatcagcccgcatttccagcatcgcttgttcctcaccgcaactccgcacaacggctatacggaatccttcacttcgctgctggagttgctggacgatcagcgcttcgccagaaatgtcctgcccgatgaaaagcagttgagtcaggtgatgatccgtcgcctcaagagcgatctggtcgacgcagatggcaaacagctctatgcacagcgcaagctgcaagcgctgctggcttcatactccgcgcgagagcgcgccattcatcagaagctgaacgactactgcgcgagccgtgagcaggatgcagagacggtcggtaatgccttcggcacgttgttcgtcaaccagctgctcaagaagcggctcttttcttctccagccgcttttgcctcgaccctggaaaagcacattgccagtctggccagtggcagccaacgcaaagacaaggatgcgatggctgatcgcattttgcgcaaggccatcctgcgggtcgatgaagactatgccaacgaccaagaggtcgagaacgcacagtccgaggcggttgaagaagcctcacgttgcgcgcaaccgttgactgcagaccagcaacaaatgctgagcgagctgcggtcgtgggcgcaaatggccaagaaccaagtcgacgccaaagccaaggcgatcctcgactggctcacgaccaatctcaagaccgacggtcagtggaacgagcgtcgggtgatcttgttcaccgaataccgcaccacccaccagtggatgcacgagatcctcgccagctacgatcttgctggcgatcgactggccatccttcatggcggtatgccgcaggatgaacgcgagaaggtcaaagctgccttccagacttcgccaaaggattcagcggtgcgcatcctgctggccacggatgccgcgtccgaaggtatcgacttgcagaaccactgtaactgcctcatccatctggagatcccttacaaccccaatgtgatggagcagcgcaacggacgtatcgaccggcacggtcagcgccagaatgaagtattgatctggcaccccgtcgatggtggcgaacatggcaaagcaactattggtggccacggtgacgacatcatccgcgcactgcgcaagctcgaatccatgcgggcggacatgggcagcgtcaacccagtcatcgcgccgcaaatgtcggggctgatcgaaggctcgctcaaagacctcgatacccgcctcgcagaaaccaagatcgccagggccagacgctttgtgcgcgctgagcgcgaactgaaagaccgagtcgccaagctgcacgaacggctcctcaccacgcagcaggatttccacctcacgccagagcacatactcatggcggtcaagactggtctccagttggcaggccgcccgccgcttgaaccttttgccctggctggtgccccggcgggcaccgtattcaagatgcccgcgctgtcgggctcgtgggcgcgctgccttgaaggacttcgccacccccacacactgcaaattcggcccatcaccttcgatcatgccgtcgccaccgggcgtgacgacgtggtgctggttcacctgaaccacaggctggtgcagatgtgcctgcgattgctgcgcgccgaggtctgggcacaagacgatgtgaagaagttgcatcgcgtcacggtccgttcagtgccagatgcgctgatcgagggtcctgccgtggtggtcatctcacgattggtcgtcactggcggcaatcatcatcgcctccatgaagagctgaccgtggccggaggctatctgggggatagatccttccgccgggaagaaggcgtcaccaaagtccaacaatggctggatcaggcaaagccactgacggccgcggattcgctattcgacgccatccgtgtgcgtttcgaccgcgctcaaagcgccatcctgcagtcggtcgacgcccggtctaaggaccggttcaagttcctgaccaacacccttcaatcccgtaaacagcaggaagtggctgacattggcaccgtgctcgatgagcttgaaaaagccatccaggccgaactgaagaaagaccagcaaccggcgcaactttccctgttctcggaagacgaacgaacacaactccggcgcgacaccgccgcactggaagcgcgtcttgcccgcattccagccgagcgcctgcaggaggctcaagccatcgaaacccgctacgccaaacttgatgaccgcacctttccggtcgccgtgatcttcatcgtgccggaaggaagtacgagatga

SEQ ID NO: 535297 - DNA, 1044 bp, Stenotrophomonas maltophilia
atgacgaaaatttcttgtgttgatttgttttgtggggcaggaggtctgacgcatggcttcgtgcttgagggcttgccagtcgttgcgggcatcgacatggacccggcttgccgcttcccctatgaggccaataacagtgccaaatttgtggagcgagacatcagtaaggtcactaccgtcgagttaaatgctctttttggtgatgccgatctgaaggtccttgcgggatgcgcaccttgccagccattttctacctatgcacaacgctacgagctcgacggcaaggacggaaaatgggggctcttatacgaattcgctcgcttggccaagggtgcccggccagatgtcatcacgatggagaacgttccgaccgttgccaaacacgacgtgtttcacgacttcgtcgatacacttaagcggctcggttacagcgtatggttcgacgtcgttgatagctcccattacggcgtgccacagactcgtcgacgcatggtgctgctggcatctcgtcatggcgagatcgcgatgattaaacctacgctcgagaagcctaagactgtgaggcaggcgattggtcgactgcgcgcgttgagcgctggcgaggcagcaccgagagataagcttcatgtctcatctaagctgtcggagagaaatctcaagcgcatcaaagcttcgaagcctggcggcacgtggcgtgactggcccgagcatctggtcgccgattgccatcgcgcagaaagcggcagaacttatccgggcgtctatggccgcatggagtggaacaagcccgcccccaccatgacgacgcagtgctacggattcgggaatggtcgattcgggcatccagaacaggatcgggcgatcaccttgagagaagccgcaatcatccagagcttcccgcgtgactatgcgttcattcccgatggtggtgaggcgagtttcaaggtgctcggacgcctcataggcaacgccgttccagtcgacttggggcgagcgatcgcgcgcagcatcaataagcacttggcatcggccaaatctcgatga

SEQ ID NO: 535298 - DNA, 1926 bp, Stenotrophomonas maltophilia
atgcaggctgacgcgacatcggccgcgtggtcggcccgccgggttcctgaggctgcgggcggggtgctggcgggcattggaggcgtggttctgttggccctgccgctggcagtgatcgctacatctccgctgatcgccgtactggcactagcctgggccgggcatgccagcctgccgtggttgcacgtcctgctgcttcccatgccggtgcttgcgctgcttcatctgtgcgccgtcactcgtatgctggccgggtatcgggcgacacctgccgatgtggcgccgtggccggccgtgcgaaggaacgaggcccctgcgttgttcgcggtgttggatgccgtagcagcagcgaagaggctggcgcccatcgatcagatctggatccacgatgagtgcaatgcctcgataacgatcgagcgtcgctggcgtccggggaccacgccggtgctgcgggtgacactgggctttccattgatggcgatgctctcacccgagcagctgcgggcggtcatcgcacacgagctggggcacgtcgagggagcgcgtgctgtattgcacacgctgctggtcagattgcttgcactgacatcgcgtggggcgccggacgatgccggtacgcggtacgcaagatcaatgtggagtctggtggcgtgggtcggccgactgtgcggtccactggccgagcgccgatggcgtcgcctctcatacagctgtgagtaccgcgccgaccttgcggcggcgcagtgctgcggaagtgcgcaggttgcgcagacgctcgcgatgatcggattggcaaggcatacgctgtcaacgcactggtggcctttgttcttccccgtggacacgctgcctgacgcgccggaaggaaaaccctttgcagggttgctggatggggcgctgcactggcccggcccgagtgaacagcgctactggctcgacgaagccgtgctgtgcggtgttgcacctttggaggcgcatccacggttgagtgaccggattcgcatgttgctgggcgatggcacgccggtgctggatccggtgggtgaggggcgctcggcgctctcggtgctggtgccgatgctgacgtctacgttgctggcggatgcgctggatcgccggtggcctgccgatgctgctgacgcgtggcggcggcatgtgcagcggtgcgagtgcctacgccgggatcgtgaccagctgctctgtcgccggagtacccaggcactgcctgcacgcgcgctggaacggctgggctggctgcagcgggagctggcggaggcggattggcaacagatcctgaacgatgcggtggcctccggcgaacaggatctcacgcttgcgcattcaatgctgatcggcgacgccattgacagcggagattgcgcaaaggcgctggagatgcttgaccgctgtgcgggccagtcgatcgacatggatcgacattgccgccggttgcgattgcgacttctgcaccgggcagggacagacgcctccaccctggcggctctgcggcgtgacgtggctgccgacgcactcgcagcgcatgtcgaggccgaggaatgggaccggctggatccgctcagtgtctttgaaccatttgagatgcctgattacgtacgcgaagacatggggcgcgcattgcggcgcgtacgggcgatcgcgagatcggtaagtctgttgcagcaacgatcgcggtggcggagcgatcgccacaggctggtggtcgtggtgctgcctgacgcagggccgaaggaaaccattcttgatcggctgcgcgtcagtgacagccaccagcggctgcgttgcattcaactgcttgacgctgtgcagcttcctgacgggctggcatggatgggcacggtagaaatgccagatagcgggctcgcggcgcgaatagcgcgcggcaagacgtttgcccagctgatctga

SEQ ID NO: 535299 - DNA, 2091 bp, Stenotrophomonas maltophilia
atgacccatgaacgcctgatcgccccccacgaacgcccggaggtcgctgatgccgtcagcgcccgtaacactgcccgggagctgcttctggccggtcaggggcaggccctggacgccctgtttgccagtcgtgacgacctggaggagccgcggaccgggctgggctcagcgcaatggctgatgcagcagctgatcgcgccgtgggttgaacagatccggttgatggagctgttgcgggagtgggttgcacggtgcccgcagagctaccatgcctggctggtgctgggtgctgcctgggggcaggccgccgcacgcatccgttcagcacggtgcgcgaaccaggtgggccgcagtcagtggatcggcgccggcctggccagagaccacgcagtagcctgcttcctgcaggcgctgagctgtgacccgcgcgggcgacaggcatggcatcgactgttgagggtcacgtgctatctcggtgagccgcaatggctgctggatcagcaggtcggcaaagtgccggatgcgtacccggacactgatggccatgatgagctgacctggcaggcaggattggcgcatgtggcgccccttggcggggctctgcagcagatgccctgcctgccgacgtgccttgcaccacggctgccgcacgagttcgaggacggcaagatctactggctgcggcaggcattggcagtcagccccaacgacctggacctgctgggtgactatctgtatttcctctatccacgctggggaggaagccacgagcagatgcagggtttcatcgacggtccgatctgcaaggggctgaccgaggcacagcgcaatgatctgcgcgagctgaaggagaatgactggatcgggatgatcgatgacagtgaagacccggaggacatcgcgcaggtaagggaaagccttgatgccctgctggctgcagacttgctgccggatacccgggcacgtgcgttgagggcctatacccggcaccttgcctatcaggcacggacggaggtgggcggcgaagtttgctggaacaaggctgaaatgcagcgcgtgtacgcgatgttggtggagatgttcgagctgatgccttacgcattcgccgagcggagtctgtatacgctggagcagtgcgtcgcccatgttggaattgaggacagcgctggtctgatgcgccgttgcctggagcttgaagagcttctgcacaacgatgcgtgtgcgctgttgtggctggacgtcgcccgccagtgcgatgcctttggtcttgctggcgatgcgcccttggcggctggctgcagggaagcccgcttggacctggcgctgcgtatggccgaggctcaaggcacggatgtgggccagcacgcattcaatctgtatgacggcatcgattcggatgccgggattgcattgttcgagcgcctcatcgcacggggtcacgcgggcgccatgctggtgtactccggcgagctatcgccagatgcaccgcccgccaagcgcggtcgtgcggtcccggacgcggcccgaagcgcggcgctgctcgaaaccgccgcggccgccgatcacccggttgccctgtgcaactgggggctcaggcgtgcaaaagccttctatagcgatggttgtccccaagcgcgcgccgacgcattgcgttgctatcggcgtgtcaacgaggtcacgctgccgcacgatcgggcttggccgtacgcaatgcagaccctggtgcggatgctttgggaaggaaccacggatgagcagcatgaggcagtccataccgtcctggttcgtatctggcttcaggatgacactgagctggaggcatgggcgtccagattcttcgccgacgcattcctggcgggcatcggtgtcgtcaccaatcgctggctggccagcatatggctggagcgcgccagcgagcgtgagccggacgatccggaccttgcagacctgcaggatcgcctgcagatgaagggccactggctgggcggcctccgttggcgccgcgccatcgaccgtgatcggaagcaggctgaccccgtggcctacgcgctgacgttcggtgaggcgccacccgactcagatgcaggctga

SEQ ID NO: 535300 - DNA, 384 bp, Stenotrophomonas maltophilia
atgaagctgcctgccctgtggcttctcctgctctgcatctccagtcttccggcattggcgcagtcgcactccgccccccctcgcaatcgcgacggcggttcgtccccccgcatcacccgtgacctgcccaaacgcatgatcgccgagcacagcaacggcagccgctcggttacaacgaccgatctcagcggccggatcatcacccagtacagcaacggtgcccgctcgaccagcacacgcgacctgagcggcaggtggcgcaccgagtacagcgatggttcgtattcgaccagcgtgcaggacctgagcggcaactggcgtaccaccgcaagcggcggcatggcggcccggcatccggagcgcggcttcggcaagaaacgctga

SEQ ID NO: 535301 - DNA, 1563 bp, Stenotrophomonas maltophilia
gtgagtgagtatttgctgctgaaagcactgattgcggtgagtgctctgtgcgccgtgcaagccgcgcatgcaggttgcagttcaaaaaatgaaggggatggccgctttcagggacacagcatggtggtcaagtttacgccaagcttggatggtggaggagatgcagtaggcgccagcctcagtcgcgcgaacgaggtggcaccttacataagaatcaggaccggtcctgatctggctaagttgaacaacgttccattcgactcgaatggtggttcggtctactacctggaaactactggccaagggcagcggatctgccgtgctgaggaatggagaaggcgggagtccaagctgattggtgaagcgcctccccaaagcctgcatcctgcagtcaagttgctgtatccgtactttgaactgcataaggcgcacgagcttgactacgatacgtcgggtcaattgacatcgattcaacagaccggcacgtcgggccgtaaggtcacaacgttctgtgcgctctatgacgaaaatggtcgcgtagaggtggcaaatgagatttcaggtgtcagcgtatcggatgatgcagactttacatgcccccagcttcgcgtgaaggcgtccaaaagtaatgcttggtacttcacctatcggccggacgggtcgctggcctctgatttgaccaagaaagccacgcgtaaggcaggtgaggatccctatcgcgaggacatcggtattggaacagaggcgaccgatggcgcgtggtacgcgagcggaagtatttatatcggagatgccaatcaacgcacgcggatcggtagcatgtttcatggtagcgagaaaggaggaattagtggaattgaagactactcattcgttatcgctcccgccgatgcgacagctcttttcgctgagcgcagtcaggacggtcaacagaagttggtctacagattccccggcgagcgcgtgccaatggaagttgcaacggggctgtttgagggcataaccgattacatccgcgtgcgcgagtaccgccaccggtcgcacagccggattttcgaaattttctccccaggtgccaagcaccctcgcgaacgccagtggcgcacgctggatctgaatcgtcaggaaaactacgacgcaaagggcaagctcacgcgggtgatcctgtccggccctgtccctgatgacggttacaccgagaacctgcgcgcctacgcagaaaagggcgtgctgaagctcacgccgctcaccaacggttacagctcctaccgcgtgtacgactatgacgccaccggcaaggagtcgctctcgttcgtctgctggcgctacgaagtctcgaccaacaagccctacacccatttcccctggtgggagcccgatccccgccccaagcgcagtcgtgaagccgaactgcagtacggcaggacgcaggtcggtacacgctgtggcactcctgacggaaagatggttgtggaaggcatgggcccggtgaagaagctgatggaaaccaaatacgtcttcggcaccacgaagcttgggttcccaggcgaagagaaggattga

SEQ ID NO: 535302 - DNA, 804 bp, Stenotrophomonas maltophilia
gtgctcggtcaggtccttgccgacgcgacgcgccagcgccacggccatcaggctgatcgcaagcaccgacaggcccgcaaccatcaacgtggccagcctcaccagcgtcgccatccgcaacagcgcctgcgaaaacgcctggctctgcacctgcatccgccgatcaaggtcacccagttgctgcaggtagcggtcacgtgcggcggtcggcaccgggccactgtcgtgccgcagctgcaactcatcaatcaggcgctgcaccgccatcaggtcgccgtcggtcttccgccacagcgcggttgcttcgcggaaggcaccgatatcgcgtgcatagcggaacgagaacaccaggcgcggaatatcagcgcgcgcgttgccgccctgcaggaacccctgcctggccttggcttcatccggctcagcctgctccagcgccagccgcgcctgcagatcgcccaacggcacctgcagggcctggcgcgcgtcgtccaggtcctgggcatcgccccgcgccaggtaacgactgagcgcggcggttgcatcctgctgaccgcgcgaccagtagccctggccggcaatccaggcggtggaggccgcctgcagttcctggatcagcgcggacagtgcgaccaatccaatcgccatgcccgtcagcaacgcaaatcgcagtcccaggccccgggtcatgggaacccgtcggctctgctggtccgtgccactcctacccatcccggatccccccgaatgtgctgcggtgacaacctcccttggaactggctcagcctaggaccgggaatgtgttga

SEQ ID NO: 535303 - DNA, 4779 bp, Stenotrophomonas maltophilia
atgttgtcacgcgttgcccaccgcctgcgcctgcgttgcgcggccaagtcccttctgctgctgtcgatgctcgcttccggactgcttgcgccgttggcggcgcaggcacagatcgtcccgacctggcgcgaggagtacggcaagcgcctgaagtacggcgatctggtcgagccgctgaagggagagatcttcggcgagaagatcaatctttacgacggttcggtcagcttcagcgcgaccgacatttcgctacccggctccaatggactggatgtctcgatcagccgcagctacggcgatattgctggcagccgcggcgacaaagagttcggcacctggacgctggacgtgccttcactttccggcatctatggcgatcagccagagacggtgtcagagggctactggtcaccgcgcgcgcgctgttcgacggtgactgcgccgccgacgctggaagtctggaattatcggcacacgcagacgatcaacttcgacccgcacacgtattgggatggggtgcgtcttacactgcctggtggcaacggtgaaaccgttctggccgggagcaacgacgcgaaacagccccggccgcaggtggggcagcccacgccttggaacacaaagggaggttggttcttctcctgcctcgcttcgctcaagagcggccagccgggtgaaggattcctcggccactcgcctgatggcaacaagtactacttcgactggatggtggcccgcgacgaagactctgcggtgctgcagccttatgacaccgtcacccatgcgacgctgaagcgcaggaaggtcttcctctacccgtcccaggtggtcgatcgtttcggcaactgggtccgttatgagtggaatggtggacagctgcagcgcatcagtgccagtgacgggcgcagcatcagcctggcgtacgatgcgcaggggcgtgtggttagcgcatcggcgggtggcaggacctggacctatggctacaggcctcagggtgacctgcaaaccgtggtgctaccggatggaacgtactggagctacaacctgccgccggtcggcgtgaccaagaagtacccggattactttggtcaaccggagagcgcgtacatggagactcccgccatgtgcgcgaaaaccaacaagatcgtgcagaccgaggtggtgatcagcatcaagcatccctcgggtgttgtgggaacgttcgcgttccggccgttccgccatggccgcaagaacgttcccttcaactgccagacttctggcgatgaccagttgctcgccgatggttggaatctcacccccatctatcgagacgcgatgtcgctggtcgccaggaccatcgagggccctggcgtgccgagggcgagttggacctatcagtacgccaacctggggtggaagtacaaccgcgaggtgcatcagcagggatggccgatggtgccagtgggccagtccgagccgaagatcacgatcgagactcagccggacggtgtggtcaagacgtatgagttcggcaaggaggtcgcctacaacgacggcctgctgctggcgacctccaccagctccggcggcaccgttgtccgcaccgatcgcagcgtctactaccccgatgcggagcttgccactgcgccattcccacgcgccgcaggacgcaacctgaagtacggtgccaccgagctgggcgaacacctgaaccggccggtccagtccacgctgattacccaggatggcgtgcagttcacccgcacggtccaggcgttcgatccctccgtgcgcgagatcgaggttgccgagtccaactcgaacggccagggccggagcacctcgacccagtactacgacaacccgcagctatgggtgcggggccaggtggccagaagcctggtgaacggcatcgagcaatcgcgcaccgagttcgatgcagccaccgcgcaacctgtacgtgcctacgtcttcgggcgcttggcgcagcaggtaacctatgccgccgacggcaatgtcgcgtcggtcaaggatggcaatggcaacacgaccacgttggagcggtggaagctgggtatcccacagtgggtaatccatgccgacggcacgatgacccgggccgccgtcaacgattctggctggattactgccgtcgccgacgagaatgactacctcacccagtacgaatatgacgggatggggcggctgacgcgcgtcgagtatcccagcgatgacagcgtcgcctggaatgcaaagaggcaggcgctcgaatgggtgccggtcaatgagtacggtattcctccgggtcattggcggcagacaacggccacgggcgacgcacgcaagatcacctacttcgatgcgttgctgcggccgatgctgacccaggagttcgatgcgggcaatcaagccgccacgcagcgcctgcagttgtttgcctacgacgcccaggggcggcagacattctcgtcgtatccggtttcagacttcccggttccctggaaggggacctggaatgagtacgacgcgctggggcgggtgacctcaagttcgcaggacagcgagcatggtctgctgaccaccctcaccgaatatctgccaggtgggcagatgcgcgtgaccaaccccagggggcaggtgacgcagacccggttccagatgttcgatgcgccgtcctatgagcacccggtgtcgatccagatgccggagggggcggtgatgaatatcgcccgggatgtcttcaacaagccattgatcatcgcccgcggcaatgccgatggcagccagacggtggcccgccgctatgtctactcgcccagccagcagctgtgcaagacgatcgagccggaaaccggcagtaccctgatggattacgacggcgccggcaacctgatctggtcggcatccggggtcgattctccatcgccactgacctgcaacaccgaagccatcagcagcagcggtcgcgccgtctatcgcgagtatgacgcgcggaatcggccaatctatctgcggttccccgacggaaacggcaatacgagttggacgtatacgccggatgggctcccgtcgcgattgttggtccggaacgattctggcgccacgacggcgtccaatcactacttctacaacaagcgccgtctgttgacggtggagagggtgtctcagcccgattggaacgattggcccatcatctacagctacaacgccaatggccacccttccggacagacctggccgagcgggctgacggtcgactacgcgcccgatgcgctgggccaggctacacgggtcgggaacttcgctaccgacgttcgctactacgcgaatggcggcatcaagcaattcacctatggcaacggcatcgtgcacacgatgcagcagaacgagcgtcaactgccttcgcggaccaccgattcgggtgttctcgactttgatacgcgatttgatcggaatggcaatgtcagcgacatctacgacctggcactgggggcgttctacaaccgtcacatgctctatgacggtctggatcgactgatcgcggcaggctccaacaactttggcggcgattcctggcaccggttcagctatgacgcgctggacaacctgaccggctggatgctgccgggtgtcaaagaccatcgctactggtacgacgcgcacaaccgcctcaccaatgtgcgggatggtgcgggcaatacgcttatcggcctgagctatgacgtgcagggcaacctgaagctgaagaatggcctcaaccacagcttcgacttcggcaatcgactgcgcgaggtcagcggcaaggagagctatcgctatgacgcgctggggcgccgcatccttgcctccgccccaggactcggagtggtgctttcgcagtatgcgcaggacggtcggctggtattccagagtgacggccgcaagggcctggggcgcgagtacgtgcatctggccggcagcctgatcgcgcgccgggactacgcaggcgccgacgccaagatcacctacctgcacaccgatgcgctgggtagcccggttgcaagtacggatgcttccggtaacgtgatcgagcgtactcattacgagccgtatggcgcgccgatcggcaaggtggtggatggccctggctacaccgggcatgtgatggacggtgagaccggcttggtgcagatgcagcagcggtatatggatccgcagttgggtgtgttcctgtcggtggatccggtgacggcgtatgagcagactgtggagcagttcaatcgctaccggtatgccaatgggaatccctacaagttcacggatcctgatggacggcagtcttcttggcagtgcctgtctgcttgcagcgtcgttaataagatgcttgctgctatgcggggggcggagaaggctgatagaagtattgtgcagcccgtcgcggctgcaatggataaggtcgacgtcaggctgagtggggcggtggccgctgggttgggagtcgaggcgtcaatgagcttaatggatggaagtggggatgtgagcttcgtgatggctggtcagggagttgcagtaagtcttacgctgcagccaaaggaaggattcaaggccgagctttcaggttcaaaaaatgaggctcctgtgagcctgacaggagaggttgctgctggatacattggcttcggtgctattgaggtggaagccaatccgggaggtgctctggagatgacgccgaagattggcgtaggtgctggagagtatcttaagaccactccatctatgaaggtattggagtggggtgggcagaaggctgataaataa

SEQ ID NO: 535304 - DNA, 1284 bp, Stenotrophomonas maltophilia
atggatcccgagttcgtcaaaatggcaggcgggattcgcaacgcagagaagtgggcgaccctcatggatcattgcgccgacatggcatgggaagaggcggaaactgggtataacacctactatttcaacagcgatgaatttgagcgtccgcttttgcatcacatgaccgcatttgcactaatggaagcaggaatctctcttccaaggcccttccccacagacatagatttccccaaagccgatgaacatctcagcgaggaggaatgggaagcccagggggatttacgacgaaataacgtgcactcccgtctgattcaggacctttactcctccctcaatgatgtatacggattctacgccgcctacatatccgaactaattgatgacgaacagatggggctaatggaaaccccggcagagaatatcgagccatgcccaatctcactagcattagctaaaatcgaagtgccccttgaactctctactggcttcgcagcctttcagagcaagatcaacgggcaatatgaggaatggctgacaattgcaaggcagcgcgcattccagacgggccatccagtaaaggtggaagtcctcaatcttgtttatgactcgcacgacagcttgggacaccaggcagaggcggagagtttcgggttcaatgactcaaagctccatcctgacatttacataaatgaactcctggtggggatgcgcgtgatccaccaagttctcccagccattctagagcgccttggaataatgagtgaatttaaacttgacgaatccgaacttggactgggacgatcactgaaaagcgagccaaatttggttcgcgagaataaagacttatcggaattcaaatccgacgggatctatgatgtcttcatatctcacgcctcggaagacaaagaatcatttgtcaagtcactggccattgccctaacggatagaggcctcaaagtgtggtacgacgaattcacactccagatcggagacagtcttcgcaggatgattgaccgaggtatcgcaagtagcagaattggcttagttgtactctctccatcctttgtgaaaaaggattggaccaatcatgagctcgacggcatattgactagaactctcgcgggacaacaacgtcttcttcctatatggcatgaaataagcaagcaagaagttctcgactacagcccctccatagccgacaaagtagccaggagtactactaactatactgccgacgaaattgcagctgagatttccatgctactactggattcaaagtag

SEQ ID NO: 535305 - DNA, 1476 bp, Stenotrophomonas maltophilia
atgacgctacttagaaaggctgcgggcccaagaatcagcgagtcggcaccttgggaagacgatccgttcgagcgggaggcagagggggaaatgcttgctcgactgatcgcatccagtacagatgctccattggtgatctctctccagtcgccatggggcagcgggaagacggtttttctgaagcgtctcgccttgcatatgaagggtgcgaaaggaattcctacaattcgcatcgatgcgtggaagaccgatgattgcgccgatccgcttgtagccatcatcgcggagctttcactgcatcttgaagaactgaggaggaaggacgagtccctctcagagaaagtggatagttgcctctcacgtcttgccaaattcggatcaaagatcctgcttccggcaacttcgattgtcgccgatcttcatacgccaggaagcggagacgtccttcgatccgccggcgcctttgcggagcggctccttgacatgcagaagagcaggagcactgcagagaaggacttcagggatgtactgactgaggcaaggtgcctggttacgggccgaggccacgaccgtagcccgagcccgatgctgctgatgattgatgagctcgaccgctgccgtccagatcatgccatcaggatgctggaacgcatcaagcactacttcgatgttcccgggatttccttcctcattgcctccgatcgcggaaacctacccgcggcagttcgatcggtgtatggcatccacgtggatggcgagctctaccttcgaaagttcttcgactatgagttccatttgcgacaacccaatccagagatctattcctcgcatctggtagccacgtgcatcaaccctgaatcaaagcacgtattgcccagcgaaattcaacttccaaatggccgcgactttgagcatgcggtgctcgccattcaatccgacgaactgggagtacgcgttctcaagggcgagtatatggatgcattcccgcagtttgcgaagacattctcactgacgcttcgtgaccaggagcaagcagtcacgatgatcacagcattcatccacacgcgcgaatcggcgatggagactatcccgctagtagactgcttcctggcatgccttcgcttcggacatcccgcctctttcaaggcattggtggatggctcgcgaaaaatcctgctcatggaggcaaaggatagggatgatgtcagtcaggccatgatccaacgattgcgtcttcttccacattgggatgccttgcagttgcttgcagggagcgcagcagtccccgacatatcaagcatcgacgatgaaattgatcctcccactctttcagagcggattctagagaactacagaggacctagtcgttcgagagcgaagcgtttgccactcctgttccttgctgcgaggctctacggtcgacagttcgatcttttccaatactcgacctccttcctgaggctgggcgtcaactga

SEQ ID NO: 535306 - DNA, 1245 bp, Stenotrophomonas maltophilia
atgaagctgctccgcccagcgctgttggccgtcgcactggcactgcccgggttccacgtccacgccgccggcgacgaccttccatcgcccgagatcgtgcgggtggccctgcgggggcatccacaactgctggccgcgcgcgccgagcatgaggcgagcggctacggtgccgaggccgtgcaacgcgggccgtacgaattcgaagccagcgtcatcccgcagcagcgacgcagcgacgctgaaggtcgcttcaacgagtgggaggcccagttcggccgcactgtccgcctacccggcaaagcccggctggaccgccagatcgccacccagatgcgcgaggtggccgaccgcacgcagcacggcgcgcagctggcgctgggcgaactgctgctggagagctggatgcaatggctggacgcggagcaggtcctgcagctgacctcggcacagcaacagctgctcgcccgtgagcgcaacgcggcacgccagatgcacgacaagggcgccctgtccacgttggacctggacctgatcgacgccgatctggcctcggccaaggcgcgcctgatcggtgcgcagtcggccgcggcacaggcacggcagcggctgcacctgcgctttccacaactgccggtgcccgagcgcgcaccgccggtggccgaaccgcaaccgcttccgctggacactgcagcgctgtcggcacagctgctggagcgcagtacagcactggcggtggcccacggcagggccgccgaacagtcgctgctggccgagcgcgcacgcgccaatcgccgccccgatccgacggtcggtgtgcgctggctgcgcgaggggcgcgatcccgagaacgccgttggcgtggtgatcagcgtgccgttcagtggcggctaccggcgtgcgcaggcacagcaggaatccgcccgcgaggccgcgctgcatgcgcaggcgcaggacgtggagcgcgacgcccagctgcaggtctgggacgcactgcaccaggggcaggcgttgcaggaccgttggaaggccgagcgcgatgcgctggccgcgcatcgttccgcggccgagcgcagccgccgcgcctgggagctgggcgaactgggcatgggccagtacctgctggccgaacgcgccctgctcgaccgcgaactggcggaacaacaggcacgtacccatgccgccaccgcagcccggatgctgcagctgcaggcgggccagctgtggagcgacgtcctgcagccgtga

SEQ ID NO: 535307 - DNA, 306 bp, Stenotrophomonas maltophilia
atgactgaactggttcgattcaacctggtgttcccgcccgtgctggaagacgccatcaccgaatgcctgatcgccgcacccggcatgcccggcttcaccctgctgcacgccgaaggccacaccagcgacttcagcagcgcgcaggtgcccgaacaggtgcgtgggcgggtgcagcggcgggtgctgtggatggtgctgccctccgcgcgcgtgggcgaactgctgatggcactgcgcaaggacgtcgcctccggcgatgcacgctggtggaccgagccggtgctgggcatggggaggctggcatga

SEQ ID NO: 535308 - DNA, 3084 bp, Stenotrophomonas maltophilia
atgctctcgcgattgattgatttctcgctgcggcagcgggtgctggtgctgttgctgtcggccgcgatcgcggtggccggggcgatggcctttctgaagctgccgatcgatgcctatccggacatctcgccaacccaggtcaagctgatcctgaaggcgcccggcatgaccccggaggaagtcgaggcgcgtgtgatcacgcctctggaaatggagctgctgggcgtgccgcgcggcacactgctgcgttctaccgccaagtacgcgattgccgacatcaccatcgatttcgccgaaggcaccgacatctattgggcacgccagcaggtggccgagcgcttcggcaacgtcgccgcggatctgccgcccgacgtcaacggtggcctcgcaccgatctccacgccgctgtccgacgtgtacatgttcacccttgaaggcggtggcctggacttggccgagaagcgctcgctgatggactggacgctgcgcccggcgctgcgcacgctggcgggcgtcgccgacgtcaacgtgctgggcggctatgcgcacagcgtggtggtggtgccggaccgggcccggctggcctcggccggcctggacttccgtgatctggtggaggcgctggaacgcaacaaccgcaatgatggtgctggtcgcctcgacgcgggcgaagaagcgttgatcgtgcgtatcgaaggcgcgttgcgcacgctcgatgacgtcgctgccgtggtggtcaagccgggcctgccaccggtgcggatcagcgacgtcgcctcggtacgcgccgaggcgcgcacccgctatggcgcggtatcgcgcgacggaaagggcgaagcggtccagggcatcgtggtggctctgcgtggcgccgatgcctcggcgctggtacgcgatatccgcgccaagctcgattcgctgggctcaagcctgccgccgggcgtgcgcatcgtgccgttctatgaccgcagttcgttgattacccgcgcggtgagcacggtgcagaacgcgctgctggaggccacggtgctggtcgtggtgctgttgctggccttcctcggtggcctgcgcccggcgctggtggtggcgttgatgctgccgttcgctgcactgggcacgttcctgctgatgcgcctgaccggcatgagcgccaacctgatgagcctggggggcctggccatcgccatcggcatcctggtggatgcggcggtggtggtggtggagaacgtggtcagccggctggacccggaaggccctggcgcacgcctgccgcgcctgcaccgcgtgttcgtggcgacccgtgaggtggccacacctgtggccgcgggcatcttcatcatctgcctgaccttcatgccgttgctgaccctggaaggcctggagggcaagatgttcgcaccagtggcgctgaccatcgtgttcgcactggcatcctcgctgttgctgtcgctgaccctggtaccggtgctgtcctcgctgctgctgaaggagcaggcacatcacgagccgtggttgatgcggcagatcctgcgcggctacacgccgctgctgggggccgtgctgcggcggccggcgctggcctatgctgccgctgcacttgcgctgctgctgggcgcggcggcctatctggtcaccggcaagaccttcatgccgtcgatggacgaaggtgacctgctgctgcaggtgcagaagccggcttcgatcaacctggagcgctcgcaggccatcgacggtgcgatcgaacgcgccctgatcgccggcattccggaaatccgccacgtggtcacgcgcgtcggttcggacgagctggggcttgatccgatgggcctgaacgagagcgacctgttcatcgagctggcgccgcgcgacggctggcgcgtggccgacaaggaatggttgatcggcgaagtgcgcacggtgatgcaggccttccccgcggtcgagtacggcttcacccagcccatcgaaatgcgcgtggcggagatgctgaccggcagtcgtggcgatctggcgatcaagatcttcggtccggacctggaagtgctcgcatcgttggcgcagcgcacccaggccacgctggaggcggtgtccggtgctgaggacgtgctgacccaggccaccgatgacgtggcctatctgcaggtgactgtcgaccccttggcggccggccgtgccgggctcgccgtcaccgacgtgcaggacgagctgcgcgcccaggtggaaggcgtgtcggcgggacagatcatcgagccggaccggcgcattccgctgttggtacgcggtgatggcgaggtgcgtggctcggtgcagcgcttcggcctgcagtcgttggccacgccggacctgggcagtattccgttgaccgcgctggccagcgttgcgcagaccagcggcccggtgatggtgcgccgtgagtccgggtcgcgctatgtgctgctgcaggccaatgtcaacggccgcgatctggtcggtttcgtcgaagaagcacgcgcggcggttgcgcgcgacgtgccgctgccacccggctacagcatggaatggggcgggcagttcgaaaaccagcagcgtgccgccgcccgtctcggcgtggtggtgccggcggcaatcgcgctgatcttcgtggtgctgttcatgaccttcggctcggtgcggcaggcggcgctgatccttggcaacgtgccgttcgcgatggtcggcggcgtgctggcgctgtggctgtccgggcagtacctgtcggtaccggcatcggtcggcttcatcgccctgctcggcatcgcggtactcaacggcctggtgctggtgtcctgcttcaaccagctgcatgcactgggccattcgatggactacgtggtgcgcgaaggtgccttgcgccgcctgcgcccggtgatgatgaccgccaccattgctgcattcggcctggtgccactgctgctggccaccggccccggctcggagatccagcgtccgctggcgattgtggtgatcggtggactggttacgtccactgcgctcaccctgctgctgcttcccctgctctaccagcgctacggccaaccggcggttgcgcgtgaggtatccccatga

SEQ ID NO: 535309 - DNA, 1161 bp, Stenotrophomonas maltophilia
atgccctcctccccttcccccgcgaccggccggccattgctggcgcggcgcatgctgctggttgccgttcccctgctgttgatcgcagtactggtcgtctggctgtggccgacgcccaccacgccgccgacagcggctgccagcgcggcgaacggcccactggtgctcaccgctgaacagatggccgcgcagggtattgccagtcaggcagtggtcgcggccggcacctatccactgccggggctggcggccgaggccagcgcgcctctggacgccagtgcacgcgtggtcgtgccgtatgctggtgtggtcacccgcctgctggttgatgaaggtgcgatggtcgagcgcgggcaggccctggccagcatccagagccgcgaggcgctggccgcgcaggccgcgctgatcagcgcacgcagcgatgcattggcggcggccagccaggcccgccgcgaccgtgagttgctggcggcgggcgtggtgccggccgcacgcgacgaacagtcgcgcgcccgcgccgcggcggcacagggcgtactgcaacaggccgagggcgcaatggcgcacctgcgcatggcccaggacggcatgcccggcgaatacatcgtgaccgcgccgatgtccggccaggtcctgcgccgtgacgtcgacaccggccaggccgtggacgcgcttgcatcggcgttcctgattgctcgcccggggccgctggatgtgcgtttcaacctgccggtgcagtaccgcacggagattgcccttggccagacgctgcacttggccagcggcgaagacgcggtggtgcaggccatcggtgccgatactgatgcggccacgcagagcctgcgcgtacgcgcgcggctggcgtcgcccggcggcgtggtggccggccagcagttcgcagtgacgctgcaggtgccggcgccgcagggcagcctgcgcgtgccgggctcggccgtgctgccggctggcgccagtcacagggtctatcgcatcgacgctgggcgcgtcgacgcagtcgaggtgcagcgcgtgctgggcagtgacggcgagcatgccgtgatccaggccgccgggcttcagcccgggcaatcggtggtcagccgcggtaccgccctgctgaaggcgatggtaccggccgccgcgtcgcagggggagtaa

SEQ ID NO: 535310 - DNA, 1395 bp, Stenotrophomonas maltophilia
atgagcgcgggcacgcgcggcactggctcgatctaccgcagcgtggtgctgagcaccctgttggcgatcggcgccgcggtcggtgcgctgttcttcaccatggactactgggtcgaccgcgaagtgcatgcacacctggatcgcgtgctgctggagcgcgcgcggaccctgcagggtctgctgccgctgacgatggcacggcagcgcgatggcagccacggcagcgacgccggcagcatcgacctggacgtggagttcttcagcctgtacgccactgatggccgcttgctgcgccaatcgacgcgcaatgcggggcgctcactgccctactccggggccgcaacgcgccagccacgtttctacgacgcggcgctgcccgatggccgccacggccgcgcggtggcaatacccgtgcaggtattcgccgatggccgcgcgcgcgaagccacgctggtggtggccaacgatcgcgaaggttgggacaaggccgaaacccgtatccacagcgcgctgctgttcgccactctgctgatttccgcgctggtttcgctgatggcgatcggccgcgtccggcgtgcattcgcgttcctgcaccgcgcctccgcacaggtctctcgactggacgtgaacgagccgctgcagcccatcggcgcgcagttcccggccgagctggccccgttcgcgaaggccttcaataccggcgtgcagcgcctgtaccaggcggtcgaccgcgaacgccgctttgcctccaacgtcgcacatgagctgcgcaccccgctggcggaaatccgcagcagtgccgagtcggcgctggcagcccaggcgccggatcaggcgcagcaggccttgcgggacaccgtggacgcgacactgcggatgcagcgcagcgtggacgcgttgctgcagctggcccggctggaatccgggcaggacgtgccactgagtgatccgcttgacctgcaggacctgctgacgcaggcagtgcgtgccgcccaacgcacgccgtccagcgacgcgcgcgccatcgtgctcggcaccgcgggcgctcgctgggtcaccgccgatgtcgcgatcctggagcgcatcttcgccaatctcctggccaacgcgctggaatatgcgaccggcgcaggcgacatcgaatgcgctgtcgagaccgccgctgatgggctctgggtgcgcatcagcaacccggccgagatgctgcgcaaggacgatctgcagcacttcggacagcgcttctggcgccgtgacccgcagggcggcactgcgcgccacgccgggctcggcctggccttgtcgctgggcctggcccaggcccacggcgtgcagttgttgttcgacgtgcgccacgctcggctgcacgtgctgctgggaccgttcgcgccgctgtag

SEQ ID NO: 535311 - DNA, 666 bp, Stenotrophomonas maltophilia
atgcgcctgctcctggttgaagactccgacgtgctttcgcagacgctcagccgcgatttccaggccgagggacatgtctgcgacctggcccgggacggtgacgccgccctgggctacctgctggcctacgactacgatgcggtggtgctggacctgatgctaccgcgcgtggatggggtgacggtgctgcaacgctaccgggcgcacggcggtggcgccccggtgctggtgctgtcggcgcgcgaccacgtgtccgaccgcatccaggcgctcgacgccggcgccgatgactatctggtcaagccctttttccgcgatgaactgatggcgcgggtgcgggcgctgttccggcggccgtcgcagaccctgccggcgcagctgcagatcggtccgttgctgctggacccgcggacccgctcggtgctggtggacggccagccgctgtcactgacaccgaaggagtatggcctgctggagctgctgctgcgcaatcgcggccgtgtgatgtcgcggcagatgatcttcgaacgcctgtacgacacccagagcgaggcctcggacaaggtggtggaggtgatcgtcagcaccctgcgcaccaagcttgagcgcgccggctcagcgggcctgatcgagacccgccgcggcttcggctactgcatcgcatga

SEQ ID NO: 535312 - DNA, 678 bp, Stenotrophomonas maltophilia
ttgccgaagccgtccaatgcccctgatccagcgagttggagcagccgcctggaacaacagctccacgcggagcttctgcgtctgggcattcccgccgacgcggtgatctaccagcccgcggccatctcggtctcggaccgtcgacgttaccagcccgatttcggccttgtcgatccgcgcacgcggacgctgctggccgtgctggaatgcaaagccgcgaccgcgaacctggacgcagcagccgaaagcctggccgcctatgccgcggcgacgcgcgatcgctcggtccgtgcctacttggccatcccgagggaagacgggtttgtgattttcgccgtcggtgtcgatggtaagcggaagcaagtgccgctggaagcactgcgcctcgagcagctgagcgcagcgcggtcggcagagaccaagcaagacacgacaatccgcaagcagcgtacgatcgatcggttcttcgtggtttgttatctcgccgcatttgtggccttcgcgttggctctagcggatctcgtcctgagccgctacggcatcaagctgctgaccagtgagcgcttgatggtgctggccgtgtcgctggccttggtgatcgcgccgttcctgcagaagttcaaggcgttgggcgtggagatcgaacgcgcgaaccgcaaggttggccatgagcgttga

SEQ ID NO: 535313 - DNA, 1440 bp, Stenotrophomonas maltophilia
atgagcgttgataccgagctgacccagccggacggcgacgccgagttcgaggaattgtgccaccagctctaccgggcgatgtggggcgacccgggctgcatgcgaatcgggcggaccggacaagcgcagtacgggatcgacattgtgggcacttggcaggggcgtcggatcggcgtccagtgcaagtgctacaagcggacgcgcttcacgatggcgaccatgcgcgacgacatcgcaaaagtcgagcaggctggtttgtcgatcgatcacctactgttcgcgaccaccgcgagcaatgacgcaaaggtggtgcttgaagtccaccagctgagcgcaacgcgcaagaaagaaggcaagttcaccgtatccgtggatttctggggggacatctgtgggcatctaagggggcatccggaggtcggccggaagtatgtccggaattttccgggtagcctggccatagccacccacgaacttgcgcagaacagtgcgttggtactggcggaggtgcaccgtgacagtgcgctcgctgccgccggcatcggcgaggtcttggtcaggctcgacgcgctgaatgccacgcagtcgatcgacgccaagggcgacgaggcggatcccgtcgtggctcacacgctgggcctagttcgggaccgcatccgccaaggacgaacgcgggacgcacgccagctgctggagggaatgggcgacccggatgctttccgcgaccaatactcgcggtttcgctggcataccaaccgtgcatcggtggatctgcaggacggtctcaccgagaacgctgtcaagggctacttgaaggcgtacgcgcttgcgcccaagcatgaaaaggccattgccaaccgtgtgcatgcgctgctgctgtccggcgaggccgacgccgcattgcaggcgtgcgatgaggggttggctgcgcacccagacaatcatcacctgtgggcattgtggatccacgcccggcacgcatcgggtgccggcgatcccgagcagggtttgcccgaaggggtgcgggatgcgccggacctgctgtatgcgcgggcgcggctggctagcaagcaaggccggcttgaggacgcggtggctttgctccgggtctgcctggcacaggacggcggcagcatggaggcgaagtgcgcgtacttggtggacgccctcgcgtgggcaaccgatgacacgatccgcgcgatgcacgcaaacatcaccgccgggcagcgcgctgcacttgaggacgctgtgggccggatggagccactcgaacaaacgctctctgctatggaagccgaggcagtcgcgctggaagccgccagcaatgcggtgagcgcgctcctggtccttggccatcaagcgcgcgcgcaggaactggcgcgccggttacttgcgcgtcatccgtcggcaacctgcactgttgcgggtccggttccttga

SEQ ID NO: 535314 - DNA, 2436 bp, Stenotrophomonas maltophilia
ttgcgggtccggttccttgagttggatgagcaaggcgacattgacgccatccgggcgttgacggacggccgtctgcacgaactcgacgaagcattgctgccgatgctggcggccgtcgcagcgggccacggcgatgtagcgtggtttcagcacgtgttcgaacaggttgaggcgcgtctcgacccgcaagggctggtagatgacgtccggatcctcggcttccaggccgtgtgggcgtccggggagtcggaattggccactgcccagatcgaggagtatctcggcaatcacccgaatcatatcgccgcgcattgcttgcgcgatgaattcctggctcggctcggcgacatgaagcgcgcgcgtgagtcggcgctcgccttggctgcgtcgtgcgctacccgtgaactcagcacggcggatctgctgcgagtggcaacgcgcctgtatgccctcgacgagtacgacgctgccgcgccgctgtatcgacgtctagtgaagacgccgggtagcgacgaactgaccgtgcggttgctgcattgttatgtcgagtcggagcagcggagtttggcgcgctcattgctggaagaactggatgccgatgcacgcgacaatgagcaggtccggcggatcgagtgcaacctcgcgcaacgaatgtccgactgggaaaggctgaaggcgctgctcgtagcggaatgcgcccgcgcgccggaacgcgcagacttttgcgtcgcgttggctaccgcgttgtatcggctcggacaggccgacgagcgtctggcgctgttgtctgccgacccgaagtttgcgaagaccgacccgcggctggagtttgagtttgcgaagcaccaagccaccgtcggcttgaccgaggcggcaatccgtcgcgtctatcggatctaccgggatagcgcggaaagcaccaccaacgccggctactttctcagccaacttctgctcgcgcaggacttcgaattgaaggtgccgggcgtcgtcagcgccggcgtttcggtgcagctgaaaagcgcggccgagacctgggtggtggcgatcgatctcgaggctgcagccaacgcggcatggccggaactggtcagcccaggctcggcgcttgcgcgccagctcctggggcgtgccgttggcgaggtggtggaggttgtacgcggccacttgcgacagcaggcagaaatcatcgcggtccacagcatctttgcctacgccgcggacaaagcacaggagcggattcgcgcatcggcggagcaggaggggccgctctggagcatgccggcgttccgggacgacggcgaagtgaacattgaggcgctcgccgacaccgctaagctccgccgagaagcctgcgaagcggcattcgggagctacttagagcacgggctccccttgtgctcgctggccaagatgcttgggaccgacgtagtcagcctgctcttggagtggccgtcgacaacgcatcggttgcttgtagacggtgcgtcgcagggcgaacgactggcggccgttgccaagatcgaccgcggccagagcccgtttgtcacggacttggtgacgatcgcagaactgacgcggcgggacgtattcacagctgccaagcaggtgatggggcgcgtgctggtgccgcgcagcgccgaggacgagttgatggatgccctgcagctcgcggacaggcaggggcccgccgcaacgttgggcgagtgcgacggtcgcgtcgtactggcggaggtgtccgccgagggccatgcgcagcgccagatattcatgcggcaggtcctgacaaacctgaaggcttgtgaggtggttcccgttctcgggccggcgcaacccagcaaccagctccggcagctgacccgagtattggatgcgaccaccgcggatgcgatctacttggccctcgaacggggcgccatcctcctgaccgaggatggtgccatacagcggttctacacgggggtttctggcgcgagcgcctgcagcatccagccgatcctactggtggccgaagcgcgcaagcggctgacgcacaacaaggtggccgaggtgttggcgcagaaaattgccgacaaccacgacttcgtaaccgtcagggctcagcacctcctggtactcgcgcgcaagacgccacatgaagtgtccgaactcgtccgcattgcattgcgggcgatcggcaagccgaccgttgagtttagttcggctataaacgttgcgctcgagtttgtcgcgcggatcgcccgggagctgccgacccacatcgtcggcgcatacgtaaaactgacattcgatgcgttgatcgaggacagggattcgcggtgcaacgagctcaggcagctctttacagacgtgctgcagccgaagttcggtcgccacggacgtcgcttaaccgctctacaacgccaacacttcggcagggtgttcgagcggcgctag

SEQ ID NO: 535315 - DNA, 594 bp, Stenotrophomonas maltophilia
atgccgcgctgggacctgtcgactgaattgatccatttcacccaaggcgagacttcggaggccgcctacgcgcggctatgcacgattctcaacgagggcctcctgcgcggcagcgatcacctaatcatgggtaactaccgttgtgtctgcttcaccgaggcgccacgggcggcggtggctgccggcttggtcaataattggaactacggtcgttacgcgccgttcgggttgatcttcgataagcgctggctgttcgaacagggcgcccgtccggtgatctaccagccggccgccgagttctacgacctgcccaccagtcacgcttggcggcacatgacctatgaaccggaccgcgatccacctgtcgacttcacctgggagcgtgaatggcgcctgcagacggagcagctgcgcttcgatccaacttgcgccggcatcgtgttgcctgaccgggactgggaggcgcggctgctcgccgagcatgacgccgagcaggactggcgagtgctcgagtacagccagatcatggacgcgagcctcgccgagcaactgcgcgatccataccggtggacgctgacatcgttacgtcgctga

SEQ ID NO: 535316 - DNA, 1110 bp, Stenotrophomonas maltophilia
atgggacaagcggtcattgccgacaattggtcgctgcagattgtggcagagctgctcaccgacgggctcgatcgcgatcagtgtcagctgttgcaagtcacggccgatggcgttccgcagctgacgtcggtgcccgcggcagccatcgcgctggagtgcctgttcgacctgctcaccgacctggtcttgcgcgaccagatcctggtcgaggccgcccacgtcgatacgtggcagcgcgccggccatgtgtttgccccggccacccggcagggggcgctgcgtggctacgacttccagccgcgggacccggagttgggcgccgtgcgcgacgcgtttgtcgagcgtctggcgtttacggcaccgctccgcgagctgcacgcgcagtacacgaccgcgtaccgcgagcacgggaccagctcgcacccactagagtcacagatcctgtggggcggcgcgggcatgttggcacgtgcggtcaagttcgacacgccgtatacgccgcacccggcacggcgccgcttctaccagatcgccggcgtcgccctgcctgacgccagcgccgccgatcgcactctcgacatggtgcgtaccagccggaccaagctgcagcggcgtgagacgcgcaacgagtcgctgatgtcactgcggctgatgctcgacccgatccccttgcaggtcatccgtgaggtcgacagccccgcggccctgattgccggtgccgtcgcgctgcgcgaccgcctccggccggtgcgcgactggctcgggctgtaccagaaacacgtcaacaacccgagtggcgccccgatctcgacctacgaacgcacgctggtcgacatcgcgcgcggggtcgacgacgccctggctggcgcggggctcggccaatcctcgatgagcgtgggctttgacgggttcagcctgtcttggaacccggccgccacttggcgcaagtaccgcaaccggctcggcgtacgcgcgatgatcaaccgactggtgctcgcccccgacggccgcgccgaactgaaaaagctgctggggtggttcgattcgcaagggacggcggtcgagctcgccgtgctcgagcatttcgcgcgcaggccctcagcgacgtaa

SEQ ID NO: 535317 - DNA, 177 bp, Stenotrophomonas maltophilia
atgagcatccatccctttgccgccaagcttgcggagaccgatatgggccttttcgcatgcgcggcgctgattgtcgtctggctcggcggcgcaatggcttcaatcgtgatcgagcaggcatggctggcgctccgccgcctgtggaagctctggaagggccgcaccaatggccggtga

SEQ ID NO: 535318 - DNA, 246 bp, Stenotrophomonas maltophilia
atgcccgttttcgagttcaaagcccgttggaaggaagagctggtgtgtaccggtccaggcggcgcattcgttcttgagctgccgatggggaggctgaccgcctatctgccctccgagcaggcattcagaagcagtgcgcccgcgtgggccactcatctttggccacagctcagagacgagctcgcacaatggtgcgcggccaacaacgcctcactggtggtggatcatcaggcgcgtatctactga

SEQ ID NO: 535319 - DNA, 144 bp, Stenotrophomonas maltophilia
atgcgttcatgggcgttacttttctttccgcgcggaaagaaaagtaaccaaaagaaacgcgccgccatccgcgagccggtgctacgcaccggtaccctgcgctcctcggcccgcttcaaggcggacccaacagccgcgcagtag

SEQ ID NO: 535320 - DNA, 861 bp, Stenotrophomonas maltophilia
atgaacggactctctttgctgttgaatcgagcggtactcgcgctggtggtgctggcggccggtgtggcgccggcggttgcccaggaggttgtcgagtacatccacaccgatgcactgggatcaccggtggcgatcaccgatgccaatggccaggtgatcgagcgcacggtgtacgagccgtatggcgcggtggtcaaccggccgttgacggatgggccggggtacacggggcatgtgacggactcggagacgggtctgagttatatgcagcagcggtattacgatccggcgttgggtgcatttctgtcaactgatccgatttcggcgacggagcatctcttctcccggtataactacgccagcagccatccctatcgttgcacggatccagatggacgggccgcaaaagacgagcttaaagcgacagcgccgattaaagatctggcgcgggttaaggtgacagctcaaggcgcatcatctgcaggttctggaagaccggcagctcaacctagcagtgcggcttccgtggtcacattgggcaccgtgttcgttagagctgccccagtggcagttccagcggtatccagtggggttgcggcgacagttgctgctcctcttctcttttttgttgcgcctcatccctgcggcgggcgcagatgcggtgagcttacagaggagtctagacgccacccaaatggttattggccaggtgataggggggcgaggagtggggtaggcgcaacgacgtcggttcaaatgagggaaggagacgttttcatggaatcaagcaggcggacaagggacagggcggcgggaaagggctcgatgactatggaacgaatcctgatacgggagatgtag

SEQ ID NO: 535321 - DNA, 147 bp, Stenotrophomonas maltophilia
atgtgggaactgctgggccagatcatctccgttgcgctgaaccctgttggccacgcccttggccgatccagtgggtggatcccgctggcgctgatgctggtcatcgcgatcagctgcgccgtgctggtctcctgcgaagcagcatga

SEQ ID NO: 535322 - DNA, 153 bp, Stenotrophomonas maltophilia
atgatgcaactatcgagccctgcggacgcccgtctgttggggctgcatcttctgcacaaagacgaaggtagggattacgcacgcttccaagggatggaatatgaagaagagtttggcgattgcgatttctttgatggctttgttgggggctag

SEQ ID NO: 535323 - DNA, 477 bp, Stenotrophomonas maltophilia
atgtattcctcccacggcttccgcactgccccgattccctctggctgggtccagatgggggaaagctgggtgctgtggtggagcggccgtcagatcgccaatgtcagcctcagcaagggcagcggcgcgcgcatccgcctcgacgcccggaagatgtggcaggtcaaggaaggacgagctgccagcatcgcccagggcaagcgctacgccgaacggtggtgcgcggccaggctctacccggagatgcgcctgcgcgcggctgttgcccggctgctggacacgactctaagcgagcccatcgaaccgctgcccgacctgccgccgactcctgagcagcagcaacaggcccgacgcctggccgaggccggggcggagcaagtagcgcgaataaaggaggcgctggagccacgccggccgcctgctgagactaagcgaggagcgccccaaatcggacgaaggtctggctacgaaacgtag

SEQ ID NO: 535324 - DNA, 1176 bp, Stenotrophomonas maltophilia
atgattgatcaacacccattgggtatcgagcacgagagtgaactggatcgcctgtacgacgcaatcgaggcgggtgaactggacgtggtgcgttccatcgcggaggcgcagccagctctgctgcggctggcccactttggctatgcaggggacaagagcgtgcttcaccttgcggcggagagcggccaagaagcggtatgcacatggctgctggagcgggggctgccggcagacatgcacttcggcggagatgatcaggagacgccgttaatgcgaactgcgtacgacggtcacgctgctgtctgcgcgcagctgctgcaggcaggtgccgatccgaatggcaccgcgctgatgcgctgccacccgctgtatgctgcgaccgtctttggacatgccgatgttgtggagttgcttctacaggccggcgccgacgtcaaccgcctgcaccggcagttaaatcggtccgcgttggacgctgcgcgaatctggaaccatcccgaactggctgcgacgttggagcgccatgggggtagaagcgtctgcgactacgaaggcccctatgtggagggagccggcgaatcgatcatcgtgttcgtgcataacacggccggaccggtgctacggccagagttctcgccggtgtctcatgacccaagggcatcgctacacctgagcctgatggacggaaaatctggcttcaagctgctgttcaccacgggactgcatgaagctggtgcaccaatgatcgagctgttcctcgctctccagagtaactggccactgccacgtaccgggctggacgacggcagcgtgtggcgattcccgcaactactgctggcgcgtatggtggagcgggtgttcgcgaaagggccgatcagcgaggggcacctggtggagcgcagcgacccagcgttcgcggatttgccatggccggaggggctcgacgccctgctcgcggtggataaaccttggaaccctgtagacgagcgcgactcgatcccgccggacgagcgcgtcaccctattggtgctggccccggtgaaatatacccgcaaaggcaggcctgacggcaccgccctggcggcgctgctagaacgcaagcgcaaggccagctggcgagtgctgtcgctacgtcgagatgatcctgatgacagcgtagccctcttgccaagctga

SEQ ID NO: 535325 - DNA, 435 bp, Stenotrophomonas maltophilia
atgctgaagtgttcagttgtgtttgtaagctctgctgtcgaagaagtgggtgaaagccagcttgccaacctaatggctgccggggccaggttcaacgaggcgtgcggatcgcgagcggttgtgtgcttcgatggacgccgcttctttacctacctcgagggaaccgccagttcggtagctgcgactttggtctacatcgagtcattggccatccactcagagcttgtgcagcttgcgcgagggactgttcagcagctccgcttctcggaacagccgttgctattcatgcgggtgaccgcctctcagcttaagtccttggtccgcgccgactggaccaacttctcccagcgcctgaaaggccggtttgatcccgttacgggcatggagcaactcgccgatctggttgcgcaatgccgcgaggtggcggcagcctga

SEQ ID NO: 535326 - DNA, 366 bp, Stenotrophomonas maltophilia
atgatcaagagcaatcccctaaacgcaccgccgttcgaccccagttcccctcagttcgtctggaagaccaggttcaaggacaagtgtgtctacaccggttgcggagtcggcctgcccgggcgtattgagggcgatcaacacgccgagatccgcgctaccaaacaggcacttgccgcaaagcttgcgcatgttcggctttcgcaatgccacgaggtgttcgtccgaaatacgacagccgctctgatcactgtccaccacttcctttctgaagcggcggagaaggacgcagtcttcttcctttgcgcagatgcggaggtcgctgggaagatcatcgccacactcaacatagaggatatcccgtcctga

SEQ ID NO: 535327 - DNA, 252 bp, Stenotrophomonas maltophilia
atgtcgctttgtgatgcccctcagatccgccccgcagagggagaggtggattacatcgacctaattgcgcgcgctggggtggcgagtggcctgatgggaaagatcaactgtcactatctcctgcatcaggacaggtgccctggagaggtcggcgaggtctgcacctgtggcctggttgtggcatttgttgggccggcgcatctcgttctagtggacggccactaccggtgctgggcaggccccatcaactga

SEQ ID NO: 535328 - DNA, 1644 bp, Stenotrophomonas maltophilia
atggcaaacgcactcaccggaaattttgggcccctggctgcaatgggttacgtacaggaacagggcgatatcggccgccagcgcggccagcagaaccggctgaacatgctgaccgggcaggcctactcggcgaccacgccgcaggatcagtcgtcgctgctgggccagattgcccagatcgacccgaaggccgcccaggcccagcagcagcagttccagagccaggaagaccgcaatcgcaatgagttgttcggtttggcgaggggctggaagaagattccgagtgagcaccggcagaagtactacgacaactttctgtcaaagcgcctgaacgcgatgggcttcggcgagcaaccggtctacaacgaggcgggcatcgatggcgtcgcagaccagatcatcgcggctttcggtcagcaagcgcttggtgcccaacccactgacgttcggtctttcgagatgatgactgctgggctctctcctgaagacaaggagagagcacgccgtgtccaactgggattggatgggcgccagtcttcggcagcaatcgcctacaaggaggtccgaggcccggatggcttgaatcgcttggttgcattggatccacgtgagatcggtgcacaggttatcggggacggagctggatacggctccttcgctcgcgctgggtctacccaggccacaatgaatggcaaccacttcacagctttcaatcagctatcaagcgaattccctggggtgactatgaccagcggagtccgatccccagagcgcaatgcagaggttggcggccagccgaacagtcagcatctcaccggcacggcggccgattacacggtccccaataacctgaagcccgcattcctgtcccgtgctcgccagcttggctatcacgccatcgacgagggcgaccacatccacctgcagctgccgcgcggcggcggagttggggcgcagaacgtattcaccggccgtagcccagaggatcaggctgctcgtacggctcaggcgacaaccgatgtggacaacgccaatttccccaacaagctcaaccaggagcgtcagctccaagacgtgaagactcaaggggcgatcacccaggcggccggcacagcagcagccgaggcgcaggctaaggaagcagcacagcgcccgaaacgaatcatgcagtacaggcaggctctgaccacagccgggaacgtggaaaagtccttggataaggcccttggcctcctgagtccctattcgacggggttctttggcgcgcgttctcgcgacgttgaaggcagtccctcttacaacctggctgccgagttggaaaccgtcaaggccaatctcggctttgacaggctccagcagatgcgagattcctcgcctactgggggcgcacttggcgccattgccgtccaggaattggtagccctgcagtccacaattgcaaatctagacccgaatcagtccgagtcccagatcaggacgaatcttgagcgggtgaaggaacactacaagaaatggaggtcggcagtggagcagtcactggcagatgaggagcgggcgcagaactcaccccctcctgcgtcggctcctcgccctgctcctgcagcggctccggcttcctccaactacagcaacctgtggaactga

SEQ ID NO: 535329 - DNA, 696 bp, Stenotrophomonas maltophilia
atggctgctgaaatcgtccgcgtcgacttccacggtgccgaactgattggtcgtctccaccaagggcagccttttgtggccatgcgcccggtcgtagaagggatggggcttgcttggcagaagcagctggagaagatgcaagcccatcctgttctccggggccagttgtacaccttaaggggtatgactggtgcggacggcaaaaactatgcaatgcagtccctctcactaactaggctccccttctggctggccacagttaaccctaacaaggtgaaggctgccattcgggagcgcgtggttctgttccaagaacaggcggctgacgtactcgcagcggcattcctctcaaatggcacgaggcaggatgcggcaatggcaaagcgtgtcgcaggcaacgtgatgtgccggatcctgcacgacaccctagttgggctgggcagggatcctaaaggctacgactacgccaccgagcatcgactcgtgaatcactgcatcactggggtctttggcggtgtctgcgaggactcgctttctacagaccagctcaagctgcagcaagagctcaggatgcagaacgcggtgtggatcgggcaggggatggcataccgtgagcgcaagcctctccttgagcagcatgcagtcacttggtgccgcactcaggaaatcggttgggaggcccccaatgcttcctag

SEQ ID NO: 535330 - DNA, 429 bp, Stenotrophomonas maltophilia
atggtttgcaagaggtttttgcgttatcttgcgttcgcactaaacaagccgccctggaccatgccaaattccccccaaaagcgacctgggcgtccgcccaagccggatgccgagaaggctgcaaatttcagcgtccgcctcccccctgagctccggggcaagctggaggaggccgcgatcgcggcaggccggtcaacgaacgctgagatcgtgtttcgcctccaagggagcttcgaagcacaggatgagtcgccgaagaggcaggtcgttgtagacgccatgcaagagtcggttgcagaggctgtccggtggtgggaagccttcgaatcgatgccggaggcaagtgagtacgagtatcagctgaagagcgcaatggacgacttggagatgtggctgggtcggttgaagcgattcgattcggcaaaatga

SEQ ID NO: 535331 - DNA, 2103 bp, Stenotrophomonas maltophilia
atggccaccgccggcagcatcgtcatcgacctgttgatgaagacgggctccttcgagacagacagcaagcgcgcagagcagcggatgaagcagctcagcaaggaagcggtaactgctggcacggccatcggcaccgcttttgctggcgctgcgacggcgctgaccgcgttggtcgccagctcgatcaacagcatggacgagctgtcgaagacggctcacgtgctcggtaccagcaccgaggacttctccaagctcgcctatgcagcaggcttcgctgacctgtcgattcaggacctgcagagtgcgttcggacgcctcaccaaggcccaggtcgaagccctcgatgccggcagccagcaggccaaggtgttcgacgcgctgggcatcagcatcaaggacgcaaacgggaatctgaggccgaccaccgacctgctgtacgacttcgctgacgcgttccagcgccagaagggctcccaagaggtcgtggccgccggcatggccatcttcggcaagagcttccagaacatgattgacctgctgaaggacggatcgcaggggctgcgcgatgccggcgcggaagccctggcgttcggtcaggtcgtctcttcagacgccggcgccatggctgagcagttcaacgacaacctggcccgcatgaagatgttcgtcaccggcgtcggcaatgccgtagcggccgacctgctgcccgacctggagcgcctgacgaaccagtttgtggacagtgcgcgcagcggccaggccgtcgaggacactgcgcagggcatcagtgacgtgatccgggtgatgggcagcgccatggaagtggcgatgaagccgattcaggcgctggatgacctcatccaaggcctgaccatcggcatggtcggcctggtggaagccggaaagggtgtcatcggcctggactgggaccggatcaagatcggctgggatgtcgccaacaacggtgctgacctcgcctactacggccgcgaccgggtgggcagagacggccgtggagcgacgccggccgtgccgaaggtcaacttcatcgaccccgccgacctgctggcgcaggacaagcaggccgtggagcagctcaggcaggcacgcgccgaggcagagcgcctgcgcaagctcgctttcggtgacgcgccaaagggcggcaagggcaccaagagccgcactggcaccgttcgcgaagagcaggacgcggtgaccaagctgatggccgactatgacgccctgtacgggacgggcaacgagaaggccgccggcttcattgcgcagctcgaacgcgagattgccctgcacggcgacgtgagcgaggcggccatggtcagctacgacatccagaccggcgccttcggacagctgagcgaggctcaggccgatctgctgcgcaacctggctgccgtgaaggacgcccaggacgactacgcggcgctgtacggcgatggcatgcagaagatggcagacgacacgcgcactgccaccgacggcatgcgcacggtcaccgatcaggcggtgcgcaacatgcaggacgccttcgccgaattcctgttcgacccgttcaaggatggcttgggcggcatggtagaaggcttcgccaagacactgcagaagatggctgcgcaggccgccgcttcgcagatattcaagatgattggaaactgggcgagcagctacagcggcgctggagctgggtggatcaacgccattggcggtgcgatcagcggttcgtccggaggccgtgcgggcggcggaccagttgcggcaggaagcatgtaccgcgttggcgagggtggccggcctgagctgttcgaccagggcgggaagacctacctgattcccggtgatgctggctcagtgcggccgatcactgctgggctgcctgcatcttcgatggcgggcggcggaatcaacaacaacttcagcaccacgctcaacgtgaccaccgacggcaccagcaacactcagcagggcaacggcagcgagcagggccggcaggtgcagcaggcattcacccagatgatcaaccagtgggcggtacagcagtcgcgccctggtggtcttctccaccaaatgagcatgcgcaatggctga

SEQ ID NO: 535332 - DNA, 330 bp, Stenotrophomonas maltophilia
atggaactgaagatggttgtcgatgcgtgcggcaggggtggattggatgcgcaggactgcgacttcccgccgttgttggactgggacgatgtgatgcgcgatgagcgcgatgacccgctgggattcgcccggcgagcaacactggcattgctgacacagtcgggggctgggttgcttgccggcttcagtggcgacaaccaacagggactggaggaagtcagaaggatggtcgcgttgttccaggcatacctgaggcggcaggtatggctcgcggaagcggcggagaggcggctggcgcgtatttcggaggcgcttgtcgccgccgggtag

SEQ ID NO: 535333 - DNA, 927 bp, Stenotrophomonas maltophilia
atgttcggccttcttctagttgcagtgtccgtcgtggcggcggcatcaccggcgacgcccgcgaagcgtgcggcagccgacaaggtgactggcgtgcgagaaggcatggagtacacacaggtacgcagcatgcttctcgacgcagggtgggtcccgctggacgcagagtacctgcggccttggccggcttatccggactatccggaggtcaattgtggcaccgggtggcaagcaacctgctccgcattcttctttcgcggtgactattacttcggggtgggactgaacccccaggagtcccgacgccatctgcccgtggagtggacgtggaggtcgagtgatccggcagggttggcacgcgaccaccgtgttgtgaaagcggtcatcagcgcgacgcgccagggcaacgtgcagatcgaggaaatgtcacctgtgatcaaagcggcgtgcggaacgaacaaggtctggctgtcctggaacaacgcagtaccaaacgcaacattggtgacatgcgactacggcggtacggcgcatgacaattggggttggctggtcgagaccggattggaagacgatgagacgcaggtgcgccgtttctctctgggcaaggtgtccagcgtcgcggagttcaagcggtttggcacacaggtgcgggatgctttcagctcgcatccctggtgctcaggcgccaagccgaaggtgccgctgaatgcagtctttgcaacgttggtgaagacgcccagccagagtggagatgtgccgtactgtttcatgcctcacttcttcacagggaacactggcactcctttgcggagcattccggcggtggacgaggtatcgccggacgttccgtgggcagaggccggcctgctcgcgagggaggtcgagatcctgcgtgactggaggcgggagtttgcgcctgagtag

SEQ ID NO: 535334 - DNA, 339 bp, Stenotrophomonas maltophilia
atggctggcgtgcaaagaatgatgggccactgggtgcgcttcatcatgcttagcggggactcgccttgcatcacggttcagattttcagatccgcaaatatggaaggcctcgttcgccagaagaaaatatgttcgcttggaaagatgcactttcactatgacttcgcgtttgtcgacgtgagcgcaatagagtttgagcaagaccaactctccctggagatggttttcttcggtcttcgcggcggtgccactgaggaaggcaaatgctcaatcgcgatcggaactagctctatcggagatctggaatgtttactcgagtatgcaagcgagtaccactga

SEQ ID NO: 535335 - DNA, 696 bp, Stenotrophomonas maltophilia
atgatggtggctctagcgatggccgcagtactgtctctgcctgcagcgtcaactgcacccccgccgcctcacgccggtttcgcactggatgcagagcgagagtacattccgatggttggcgacagcctggcgtcgcttgtaggcgagctggacggcgagcccacctctggcgccaccatcgatcgggtgctggctgcattggaggagcgactgaaccgcatctcatgcaagccaacagagcccgatgacgcgcaatcgctgccacgtgacgtcacctgcagcgcacctgatgcagagcaccttttttcctactacgcggccttgcggcgggcagagacgccggcagaacacgatggtcatggccgtcgctttctagatgcctatgagatgttgctcaaggactcaccggatgtcgccctcacgcggccacgcaaagatgaagcagtggacgggctgttgcacttgctctttccgttcgaagcctggaacaagaggctaaacatccctcacaatcaggtgcacctcccatttgttcctgtatgcaacctcgttgtcgctcgcgctgcgcgttgcccgggagccgaccagttgcgcaggcagatccgccaggcaggcgatgagagcgcgcagcgtcggttctgcatcgaagcgttttcaaggcggcagtttgagcagagcgatggatgcccggagtag

SEQ ID NO: 535336 - DNA, 552 bp, Stenotrophomonas maltophilia
atgatccccgcctccttcgacagcggccatcgcatgatcgccgacaccctggccgcattccgtgccggccccaccctgcggcgcactccgctgcggcccgccccgcaggcagcgggtccgctctacatcggcatcgccggcgccacgcatgcgggcaaggacaccctggccaatggactggcttcggcactggcgctgccctgcgacggctttgcggcaccgctgcggcagctggcgggacacaccccacggcacctgatgcagaccgccgggatcgaatgggaacgtgattgcatcctccccgagctgcgggtgcgcgcgttgttcgcacgcctgcctgcaggcggactagtgccggatgtgcgcttcgccgatgaagcccgcgcgatccgccgccgtggcggtgtcgtgatccgcgtcaggcgtccgggccatgacaacgaacagggcttgccggaccatctggtcgacatcgaagtaaccaatgacggcaccgcggccgatctggtgcgcaggacgctggaccagctgctgtcgcgcggcgtgatctga

SEQ ID NO: 535337 - DNA, 276 bp, Stenotrophomonas maltophilia
atgccggcggcgcactgccgcattgacctcgccatcgccccggcgcaactgcgtgtcgcgcccgcgctgcccgacctcgatggcgctgatgacgaagcactgctgcgcaatcacgtcgaggtcgcacgtcggtaccacgcgctcgccgatcagctgcacgcgctgctgtgcagcctcggtggccagcgcggcatcacgctcaatggtgcgcaacccctgatgcctgctggctgtgacagcggtgttgcatccccgcgcgccgcgaccacgcgctga

SEQ ID NO: 535338 - DNA, 636 bp, Stenotrophomonas maltophilia
atgaatacaccgagagaatgcctagaagttccggccagtgcagatggttggctcgaccttctcacccgactcaatcaaggagtcctagtcacactggaagaacggcttgctgcaactcacttcgacatgggtatgcgaccgttcgccgagcagtacccggacagccctctggcagacgtcgctcgacgcgcgctgtctggaaccctcgattggtgtggcgtgcccggcgccagtgaacaggccattgttgatgctgaaacgcgccttggcgtcagattgcccaagagctatcgcgatttcctgaaggtcagcaatggctttgcgatgccaggacgcttcatcgacatcctgctgcccgtcgagttgatccgtccgttcgggcaggacaacgaagagatcgtgcagatccgccgggagctggttgaggacccggtggaggaggcgttccagtaccacctgcaccgtgccatacaggtaagcggcacgccgcagatgggcgatgacttcatcctgctcgacacccatcgctccacagcaccgaatgaatgcgatgcgcatatctacagccgtgtcgatattgattggtacgcctcgtttgcacacctgatggcggagagagcaacgttcaatctgtga

SEQ ID NO: 535339 - DNA, 1197 bp, Stenotrophomonas maltophilia
atggcacgcccccggaagcacaaccccaccattccggggcatattgatcagaaggcaataccaaaggggatctactgggacaagtctggctcaggccgatggtacgtactggattacccgcgcaaggctgtaacggtagccgactccaaggctcagctttccgacctacacgccatcatggaggcacgttctggggcatctgagaaaggaactgtgggctacgtgatggaccgctaccacgaaagcacgaagttcgctgcgctaagtgaaggaacccaaaaggggtacaagcatcagaaaggattggtcgagacgtacatgaccaagaggggcgtaaccctggacaagatgctggtttcacgcctaagtgtggctgcgattcagcgtgtggttgagtcaatcgcgagcggccatcagggcgagcggccaatgcctaccaaggcaaatcatcttcaccgctacctgagtcttgttctcgcatggggcgtccagcacggctactgccagaccaacccggcccagggcgtggctcaggcaaaggagcgtaagcagttcaagatgccaacccctgagacctatgccaagcttgttgccttcgcacaggatcgtggaagccgaaaggcccacacaggcgggagcgtagctccctacctcgctccacttatggtcgtcacctacatgtgccgcctgcgaggaatcgaggcagtcactcttacggatgccaactgcaccgatatcggcgttgtttgcaatcgccgaaagggcagtaaggacaatgtgaccgaatggaacgatgatctacgctcggcgtgggacgccctagatgggatgcgcaaggaggcgatcggacgacacagaaggccagtgcagttgcaacccgataaacggccattggtagtaagccagaagggcttgcctctgacaaaatctgggctggattcggcgtggcagaggctcatggacctggcaaccacgggggaagacccattattgaagcccggggaagaattcacccttcatgggctcaagcaccgaggcattactgacagcgagaagccagaagatggcggccacaagagtgcagccatgcgggatcgatacgaccaccgactgccagtcgtgaaacctgcatccctcccaaacttttcaggagtgttttcaggagtaaaagaaaaaggctccaccaatgacgcctaa

SEQ ID NO: 535340 - DNA, 237 bp, Stenotrophomonas maltophilia
atgggcgcggctgagagattgccagacgtttatacattccccgatctgcagcagatgtgtaggcctggacacaagccgcgccgggcgaccgtagaggcgtgggcgcgagcgcagcggatcccctatcggtacgacggccacggtggtatctggacgacgcgggatgccctgaacactgcgcttggcttacgaaagcctgcgaccaacgaagaaccgtatgacccagaggatttctag

SEQ ID NO: 535341 - DNA, 357 bp, Stenotrophomonas maltophilia
atggacgttgaacgactggacgatctgcgcgagctgattggcgaatactggtgtttggcattcgcagagggccaagagggtcgcaacacggacactccggatggcgctgcgcagaagtgcatttctgcgattgaggcgatcatccgcgaggctcgcgccgctttcacgccgcccgagggctatgtgctggtgccggtagagccgactttggaaatgaacgcggcgggcgagaattccgttcgacacgacgttgatcccaagcacaagccacagccgaaaactgcacgtcgggctgctcgaaatgcctacgtttccatgctctccgctcgcccggaggtgccggatgggcgcggctga

SEQ ID NO: 535342 - DNA, 126 bp, Stenotrophomonas maltophilia
atggctaaccagctgctcaccgctgcaatgatccacgtgttcgccctggccgggtttgcggccggtatcgccaccctgtgggcgatcagccgcgcatgccgcgccgcgcgcaatgggctccgctag

SEQ ID NO: 535343 - DNA, 297 bp, Stenotrophomonas maltophilia
atgagcggcctctacgaatccgtgatgaatgttgtgaccctgttgaatcaggtcccgctcaccgatgtgcggctcgtggatgcacattcccttctccgcaaagccctcatcgagttcccgccacaggatcatcctgcgcccgcatcccgcgtgtcgatcaagcgcaggacgcgtgccgactacggcttggatgatccgcacggccttcccgatccatatagcaagggccacctcgatggcttcaacgaagcgatcagggagatgcgtagggcagagcaaggccagaccaatggctaa

SEQ ID NO: 535344 - DNA, 498 bp, Stenotrophomonas maltophilia
gtgatctggaaggaggtccccctgttcaatggccgatacgaggcatccgattgcgggcaaatccgcatgaaagagaccggccagatcaagtcgctccgaccgcgacgtggctacctgagcattaccgcataccaccgtggagtagagaagaatctgtatgtgcacaggatggtagcactggccttcatcccccagacggccgctgaggtaaaccacaagaacggcgtaaagacagacaaccgtgtcgacaacctggaatggatttcgaccgcagacaacctacggcatgcgaagacagcgcttgagaaaaactgcacgcctgtgattgccacttccatggctagcggggcatcggtgcgcttctactcgatgaaggaggcatgccgtcgcctgggcgttcaactcagctcggtcagcctgtgcgtcaggggtaagcagagatcctgtcatggctggacgttcagggccgataggcgagaccaggcggtgggcaaatga

SEQ ID NO: 535345 - DNA, 612 bp, Stenotrophomonas maltophilia
atgagcaacgacaaaacaaccctggcggacgcgcagcccggtgggagggtgaggctgggggatgctctgttgccctgcccgctctgcggaaacgatgccgagttcgtgccgtacaaggacaacgggctgaccctgaagtgcaagagcatgggatgcatccagcggaaccagcgcaccctccgctacggaatcgattggctgcggacctcgatggcagaacactggaatacgcgcgccctctccgcccagccctccccgggtggtcaggacgggctggtgcaggaagcactggagtacttcgagcgtgccggggatgctggtgaccggcagtacgtggcagcaatccgcgccgccctcgccgcccgccagccggtggggtgcggtgcctgcggcgacggatgcaccgaccgtgctggttgccgagtggtcgaagagaatccgcccgcgcaggccgtggacctgggccgcatccgttcgacggtgcaggcgctgctgaactggattgatgactgggccgaaacgcctgaggaatcagggatcgacgccatcgagattgaagcggcggccgtgctggacctgatcgacagccatacggcaggaggccagccgtga

SEQ ID NO: 535346 - DNA, 291 bp, Stenotrophomonas maltophilia
atgaccaccgacaacaagaccctggctgtcgaagcaatccccgtcagggacttgatgagactcctctgggtcggcggcggaaccgccaatcagttcattgaagccagcgccgctatcggagagctgattgccgcagatgaggaatacgatgctgcgcaagctgcacacgacgactcggcctcgtacgacaacgaaggtgcgtcagtccccaaggcgatctatgaacgaatggaagcggcaagggcacggcgcactgccgccctcgcccgcgtcaaaggcggtgccgcatga

SEQ ID NO: 535347 - DNA, 363 bp, Stenotrophomonas maltophilia
atgagccacatcaagcgttggtcccagtgcccatccgatgagcagatccacgagagcgaagacggcgactacgtcctccactccgaccacgaggcagaggtagcccggctgcgtgctgagatttctgagcttaaggatgatccgagctacgagactgcatgcaagacaatacggacgcttcttgctgaggtggggaagtatcgaaaggatgcggagcggtggcagcacgcgcgcaagctgttgacgattgatgacattgccgaacgccaggagattctggaagcatggaacaacctggttagcgaggttgaatgcgaacgtgctgatgaggccatcgacgccgcaatgggagcccgcgcatga

SEQ ID NO: 535348 - DNA, 339 bp, Stenotrophomonas maltophilia
atgagcgacgtgaagttcatcagcgggctgacctttaaggcgccgcacgataaggcccccagctacatcatggctcgcggctcgatcaagcgagaagacctgatcgcatggctcggcaccgagcatggcgagtggatcaacttcgacgtgaaggtctcgcagaacggcaggtggtacgccgcagtggacgagtggaagccgaaccagtcaagcggcaccagctcccgccagggcggtcagccgcagcgcgagcggccgcagagggctacggacaatgcgccgcgcgatgagtttgagagcgatgacatcccgttcctcagcatgcaggggggctggtga

SEQ ID NO: 535349 - DNA, 213 bp, Stenotrophomonas maltophilia
atgtccaactcgtcttcttccagctcgggcggcatcggattcgtcggcctgctcaccatcgttttcatcaccttgaagctgaccggcttcattggatggtcgtggtggtgggttctttccccgatatggatcggagcggcaatcaccttcggaatcatcgcaattgtcctcggactttcgctgatcggcgcgctattcgcatcacgacggtag

SEQ ID NO: 535350 - DNA, 303 bp, Stenotrophomonas maltophilia
atggaccttgcgcacagggggattgcagcgatgagtgagaaggccaagtacaagctgaaggttgacacctcagctagccgaattgatcaacaaggcgagttccgctcgccagaacagtatggagtgttgtgctgtgttctggcggggcaactgtctgacgaccacaagctgcttaaggctgcgcccgatctactggaggcaagccgcatgctgatcaattccatcgagggtggaagcactacccctgaagaagcgatcgccgccgcgcgcgccgccatcgcaaaggccacgggagaagcctaa

SEQ ID NO: 535351 - DNA, 192 bp, Stenotrophomonas maltophilia
atgaagccggattggaaggatgcgccggagtgggcgaagtggttggccgaagacgccaacggattttggtactggtacgcagaccaacctcggatcgagggcatcgatagcgtgtggtcgtacgggggcacctacaaacgcgcagcaatgccggatgcgtcgtggagagactcgctggagagtcgcccatga

SEQ ID NO: 535352 - DNA, 249 bp, Stenotrophomonas maltophilia
atgactacgagtgttgatgcgctgtcggtgatgcagcggtcgagcctgcgcattgctgaactctcgggcggctgcaagacggccactgaagctgagttgcaggaagcccgcgccgcagtcgccgagcttatcgaggcggcctctgattatcgttctggcattgcgaactttcttcccggcctaagcatcccgttggcccttgctcagtatcgattcgatgccgccctcgcacgcgtcaaaggagcctga

SEQ ID NO: 535353 - DNA, 195 bp, Stenotrophomonas maltophilia
gtggacaagacctttgaagtagttcggatcgcaggatcggacatcctgcattcgaccgtccgcgtgatgcgcttgggcgacgaggtgttcctggttgtcagtagcggccttagccgcgcgacctacatgttcctcccctccgaagccgtgaccatcggcgagcagctgatcgctgctggtaaggcgggtgagtga

SEQ ID NO: 535354 - DNA, 498 bp, Stenotrophomonas maltophilia
atgagcattggcgcccgtttagaagagctccggaaggcagcccagctgacccaacagcaggtggctgacgtggttggcacgacaaagcaatacgtcggccgcctggagaagagtcagaaccagaacccgaatggggtcttcctgaccggctgggcgcgctacttcggcgtcaatccccgctggctttccacgggagagggcccaaagcaaggggcgcctgatccgtctcagtctgcgcgacctgacttcgtgaagatgggccatgcggtcgttgtgcttcgccactaccttgagctgacaggcaatcctgttgactggctaggtgatccggtgatgcttgaagcggcctacatggttgtcgaggagttcgatgggggcagtccccaggacaacgttcttgacatgaccaagatcctagccaagaagatcagggggcatagcgatggacagcaagaccaggttcgaggaactcgcacagcgtctggcagcaagggctga

SEQ ID NO: 535355 - DNA, 795 bp, Stenotrophomonas maltophilia
atgtccaactccgtcatcgacgcctgccgagccctcaagatgccgccgccctccaaggcggtgctgatggctatggctgactacgccaacgaccacggcgagtgctggccgtcgatcacgacgctgtgcgagttcacctgcttcgggaagacggccgtgattgcggcgatcaagtggctggaggaccacaagctggtctctgccaaccgtgacaacggccgtcataccacctacgtcatcacccccaagaactacgaaaaccagtccgcctcgcgaaccagttcgtctcgcgtaccggtccgtctggcggatgacacccgtccgcctggcgaaccggccccgtccgcctcgcgaactggacccgtccgccaggcggacactaaccatcaagaaccatcaagaaccatcagtaaagcaacccccaagaagagcgctcccgtgtccacggtcgccatgcccgagggcgtcgacccgcagacctggactgactggctcgcactgcggaaagccaagaaggcgcccgtcaccgagaccgtgctgaggggcgctatcgccgaagccgccaaggcgagcatgccgctgacccgattcctcgaaatctggtgcagccgtggatcgcagggcctgcaggccgattggctgaaaccgaacgaacgagcagggcccggggtcgtcgtcccgatccgcccatccgcatccgccgacttccgaggaaagacctatgcagccactgccatcgaagacctaccccccgaccttcgcgacgctgcccgagcagccattgcagacggttga

SEQ ID NO: 535356 - DNA, 261 bp, Stenotrophomonas maltophilia
atgagcaagttcttcgtggggcagagggtgcggctggttcgaggtcaggatcatctggactatgccgagatggcgaccctgggtgaggtcggccagatcgtgagtgctggcaagtggttcccggaggactatgaggcctcctacgactgggttgcgtcgttcccgtcctacccgtcgctgtgctgctatgcatggcaattggagcccgagttcaagcccaagcagcagctgatggacaacctgcaggaggtgatggcgtga

SEQ ID NO: 535357 - DNA, 144 bp, Stenotrophomonas maltophilia
atggaatcgagcttcgtctacatcgcacgcgatgtgctaagcgggaaggtgctttgtcgtgccgaaagctatgaggagatgtggagacttctcaaggcatccggagacatcagaagaatctggagctatgaggtgaaggaatga

SEQ ID NO: 535358 - DNA, 324 bp, Stenotrophomonas maltophilia
atgaacctcgaacagatcgacaccagcactacggcggggaaggccgaggtcatgcggcttgcggcggaggggcggcgtatcgccatcgactatcaggacgggcgtggctggcaggtgtggggcgttgataacgatattgaatggaactggggtagccagtccttcgccatcatcgccgagctggttgggccggaggaggcgtggttggtcatcgatcccagtattcatgccctgacagaagcgtctgcgaagtcgtatgccgaggcgcatggcctgcaggtagttcgttaccgccgagccgacctcgctggggagaagggctga

SEQ ID NO: 535359 - DNA, 195 bp, Stenotrophomonas maltophilia
atggacatcttcttcaaagtcatgcaagtgctttcatggatcgccgggcggctcttgatagcactatttatcgtgttgctggttctggtgttcctcggcccggccgcttggataaagatgggcctactagtcgagtgcaagcacgttcaaaagtgtgcggccgagcatgggattgagtacgaggaggctcgctga

SEQ ID NO: 535360 - DNA, 366 bp, Stenotrophomonas maltophilia
atgaacgagctgatcctgccgtggccgcacaaagacctgtcgcctaatgggcgcgtgcactgggccaagaaggccaaggccaccaagaaggcgcgtgccgatgcggggtgcttggcgttcctagctgggtggcggaagacggagttccacgagctgagagtgcacctctggatcaccttccaccctccaacccggatgattcctgacgacgacaacatgctggcccggttcaagccataccgggatggcattgccgacgcgctcggcatcgatgacaagaggttcatcagccacccgctggtcagcaccgaggtccgcaagggcggccaggtggtggtgcggatcactggagggccgaacgcatga

SEQ ID NO: 535361 - DNA, 219 bp, Stenotrophomonas maltophilia
atgagccgcgcccatcagatccggcagtggctggcagagaatccggggtggcatttcatgggggatgtctgcgatggcatggccgggatcgaatcaaagcgcgtagcccatgacgtcgatcagatggctagacggggtcagatccagagcttcggcaaacacggcaccaagcgctacagctgcaagacaaatcaacaggaggctccatatgcaagctga

SEQ ID NO: 535362 - DNA, 351 bp, Stenotrophomonas maltophilia
gtgaatgctttccagatacttgctacctgcgggacagcattaggcctcctgctgacggtagccctgtctatcgccgggtgggtgatcagcggccaacgggccaagatcactgagattacgagcctgattggcagcctccagaaggatatcgccaaggtccatttgaccatggtcgaggaatacgtgaaggaccacgacctgcagtcaacgctagagcgtctggataagaccctggacaagatggcgagcagcattgaatcgaccggtgcacagctgcaggcattgggcctgacgatggcccggattgagggcgctagcgcggcatcggcaaccaaaaggagcgcagggtga

SEQ ID NO: 535363 - DNA, 312 bp, Stenotrophomonas maltophilia
gtgaagcctgatgcagatatggcagagggcgtagggctgttgcgcggcctcatgggtgcacgggttggtggtgactccaacatcaacgtcaacctggttggcggcagctcatggatggtttggatctctggaacctgctgcatggtgatgttggccgtggccctgatgggcggaatgtggctcatcagcgatcgcgccgaaatccgcgcccagctccgagagcgacgtgacggcgagaacgccatccgcgcttatatcaacacgggcatcctcaagccccagaacgacaaggacaagagcgatgccgaatga

SEQ ID NO: 535364 - DNA, 252 bp, Stenotrophomonas maltophilia
atggcgaagttccgaaagcgcccggtcacgattgaggctgtgcagtatccctgcgagcatccggcccttgagcgctgcacctgtgatttgaacccaggcgcgcggtgcagccactgtggccgcgtcttcattcgaacccttgaggggtgcatgaacgtctccgatggcgactggatcatcacgggcgttcaaggcgagcattacccctgtaagccgggaatcttcgcggctacctacgaaccagcgtcctga

SEQ ID NO: 535365 - DNA, 396 bp, Stenotrophomonas maltophilia
atgaccgtgagtgatattggccgagtgacccgctgcgtggtctctgcccacaaccgggaccgggtccattacgggcagatctatagcccagagcgcaggcagctggtgactgacttcaacggcgccctgccgcctggagtgacgatcaccaaagcaacctggaacaccatggacaactggaccggcgtcatgtctgacccggtggtggatggccgcaaggtaacgatcaacgttcaggcccagatagacggagcctgctgcatccgactggacgctgagctgagcaacggagagcgctactgccaatggcatgtgctgcgcatcctgccagcccgctatgtccgcaacgacaactggatcactggccctcagcagctggtggcattcccgagctaa

SEQ ID NO: 535366 - DNA, 399 bp, Stenotrophomonas maltophilia
atggcacgcccgaccgtatacaagcctgagtactgcgaccttgtcgtagaactggggaggcagggtaaatctgtggtccagatggcctgcgccatcgatgtcgtccgcagcactctgtatgaatggtgcaaagataaccctgagttttcggacgcctttacgcgagcgaagcagctgagccaagactggtgggagactcaggcccagtgcggcctcaccgctgacaagttcaacgctcagctttggtcccggtctatggccgcccgcttcccggaggattaccaggagagaaagggcgtcgagttgagtgggcctggcgggtcggatatcaagaccacaacccgcatcgaactggtggcggctgctgcgcctgcgtcggatgacgaccgtacagattga

SEQ ID NO: 535367 - DNA, 1086 bp, Stenotrophomonas maltophilia
atggcagagatcaaagcggcgatctggtcgcagccttggctggcgccacacttcgatatcggcgaggagtacatccggactgtcgaccggcgagtggagtttgcattcattggcctgcgccgaaacctggacagcatcaagtccaaggcgcggattctgctgctgtgggttgatgaggcagagaacgtcagcgagacggcctgggagaaggcaattccaaccgtccgcgaggaaggctcagagatatgggtgacttggaatcctgagcgtaaggccagcgctacgaacaagcgcttccgcgaggatttgcctagccgcagcaagatcatcgagttgaactggcgcgacaacccgttcttccctgattccttgaaccgcaagcggctggaggatgaggaaaagcgtccggacagctatgagcatatctgggagggcggctacaagaccgctctgacgggtgcgtattacgccaaggctctaggagacgcaaagcgggctgggcggattggcgaggtcgctatcgatccgctgatgacgatccgagcgtactgggatatcggcggcacaggagccaaggctgatgcctgcgctatctggattgtgcagttcgtaggccaggtgattcgggttctggactattacgaggctattggtcaagagcttagcgctcacgttgagtggctacggggctctggatatggcaaggcgctatgcgttctcccacacgacggcgcgaaccacgacaaagttttcaaagtcagctacgagtcggcgctgaaggcggcagagttccaagtccaggtggtgcccaacatgggcgcaggtgcggcgatgaaccgcattgaggccgctcgccgattgttcccgtccatctggttcaacgacaagacaaccgagccagggcgcgatgcgctgggctggtatcacgagaagcgagatgaacagcgaaacattggctttggtccaaatcacgattgggccagccatgccgctgacgcattcggcctcatggccgttgaccacgcatcgaacaagcatgtccaagccactcctgtccgcctcaacttcgcatcggaattctcttaa

SEQ ID NO: 535368 - DNA, 2034 bp, Stenotrophomonas maltophilia
atggctgagtacaagaacacgccagaagatccgaagttcgctacggagcgttctggcgtggacaaggaagctctccacaaggagatgctgaccaggcatcaatacgcccgcgactactggcgcaaccagtaccggctggccgagcaggacatggagtttgccttcatgcctgacacgcagtgggacgagtggatggcacagacccgcgcgggtcgccccatgtacaccgtaaacaagctgcgccaggccatgaagcagatcaccaacgaccagcgccagaacaggccgcaggcgaaggtgagggcggtggaggacagcgactcggacctggccgagattcgtcaggggctgatccgcaacattgatcagaccagcgaggccgaccgggcacgcgacaccgcattccagttcgcagttggcggcggctatggggtatggcgcgtcaattacggctacgaggatgacggcggctttgacatggtcatccgcaaggaggagatcgctaacccttacacggttgtgttcgaccctgcggccaagtcaaaagatcgccgagatgcccgctttgccttcgtggacagtacctgggcgcgctcggcattccgggcgaagtggccagatgcccagcttgtgtcagtcgatgactgcggcgagacgcatcgcgactggttccaagaagaagaggtgaccgtctcggagtactggtacaagaccagcgagacgtacaccctggtgctgatgtccaacggcgcctcatacgacgaggctgagattgccgacgttttggacgagatggcccaaacagggatcacggttcagcgtagccgcaaggcaacccgcgaaaaggtctggcagtgcatcgtatccggcgctgagatcctagaggggccgaacgagtgggctggccgtttcatcccgcttgtgccggtgtggggcgaaatcctcaaccttggcggcaaggagacattcttcggggcggtgcgcttcggcaaggatgcccagcgcatgtacaactacgagcggtcgaccttcatcgaggtcctgtccgaccagccctacagcccgttcatggctccggctgaatcgttggctggctatgaggggcagtggaacagcttgaagaccaagcggccacctgttctgctgtacaaatccgatccaaaccttccgaatggcgggaagccttcccgcgagccgactgcgcagtttcccgccgccctggcgcaggcagccgcaatcagcagcgacgatatcaaggcggctactggcatctacgatgcgagccttggagctcggtccaacgagacgagcggccgggccatcttggctcgccagcgcgagggcgatgtagccaacttcgactacatcgacaacctgtcgtacgccatgaagtacgactttgagatcaccaacgacctaatcactaagatctacgacacagagcgtcagatccgcatcatcggcgaggacggtgctgagaaggtcatccgggtcaatcaggccgtggtcgaccagcagacgggtcgcgaggtgacgctaaatgatctgtctcagggcaggtacgacatcgcggtgaccatcggtccgagctacacgacccagcgtatggaggctgccgaagcaatgatgcagctttcgaacgacccgagtccgttggggatggtggccaagtatgggttcatcaagtcgcttgatatgccggggcttgaggatgttcggaaggccgcgcgtcgaattgtggtgcaggcgggactgttggagccggaagagggcgaagaggcaccgcagcaacagcagcccagccccgagcagatggcacaggcgcagcagatgcaggcagacgctcagaagtcgcaagcgcagtcggtcagctacatggcatcggcacagaaggatgcagcacaggctgactctattcgccttgagaacctatcaaaggaacaggagatgcagctgcaggaactattccgaacgttcctgacaactcagatcggaatgcaaggggcccagatgggccccttctcatttcagtaa

SEQ ID NO: 535369 - DNA, 912 bp, Stenotrophomonas maltophilia
atgagtgacgaagtgaccaagccgggtccggtggacaatagccacctggacgcgggcattgccgcgcgagctgaaaaggccgaagcacagaagccagtggagaaggagcccactgagcagacggcagaggttcagaccggtgagcagaacgaacccgaaggatcggcagcttcggaaacggatgatgcggccgcccagaagcccaagaacaagggtgtcgggaagcgcatcgatgagttgacgcgtgagaagtacgacgcgcaacgggatcgtgactactggcgcgaacaggctatccgcaatcagcggcagcccgagcagcgtcaggatcaggcgagtcagacggaacaagcccccgacgaaccgacccttgaagagcatgggttcgatgtcgctgcatacaaccgggcctggtacgactggcgcaagcaacaggacgccacggctgagcagaaggagaaggacgctcaagcacagcaggatcgtggccggaagtttcaggagagcgttcaggcgttctccgagcagcatccggacttccacgatgtattccatggcggtctgcccgtttcgccatcgatggcggaagccatcaccgaagcggacaaccctgctgccattgcctattacttggggcagaacccggaggaggccgcacgcattgcggccatgagtcctacgggagcaagccgagccatcgggcgtatcgaggcaaagctggaagcccaggttgtcaccacgcccccggccgccgaacaggcgcgccagccagaaaccaaaaccgtgaccaaagccccgcccccggtgactacgctctccggcgctccgcctgttgtgaaggacctggcagaaatgtccatggccgactacgacgcgcagcgcaggaaagagcgcaaggcccgtgggctctaa

SEQ ID NO: 535370 - DNA, 1191 bp, Stenotrophomonas maltophilia
atggcaaatcaattcctcaatacccagctcatcacccgagaaatcctgtcggtcctgcgccagaagctgaccttcctgcgcaagatcaacatggagtacaagggggagttcgccgtcactggtgcaaagatcggtgacaccgtgaacatccgtgtgccgacccacgccaagatccgcagtggtcgcatcatggatgcttccaacatggtcgataagaccgttccgctgaccatctccgaccagacgggtgtcgatctggtgtggaacagctcggacatggccttgaagatcgatgacttcagcgcccgctacctcgatcagccaatcgctgacctggcctcgcgcatcgagcagaccgttctgcagcgcgccctgccgttcgctgccaacttcgtgccgaacgccgatggcaagctggacttcgttgaagccctgcgcgccaacaaggtgctgaccgacaacctggcgccgacgcgtcgattcctggtcaccaacaccagcggcactgtgcaggtggtcgaccagctcaagggcttcttcaatgcccaggaccgcctggccgagcagtacgaagatggcctgatggcccgcgcggctggcttcgactggttcgaaaccaccaacatgccggcgcaggcatacggcacctcggccatccccggcacctatcaggtcaatggtgccaaccagaccggcagctccattgcggtcaacaccggcactggcaccctggtcgctggtcagcatgtcaccttcgcgggcgtgttcgcagtcaacccggccaccaaggtgtcgaccggcgtcctgcagaccttcgtggttaccgcgaactatgctggcggcgctggcaatctgcagatctccccggccatcgtcaccagtggcccggagcagaacgtcaccgcatcgcctgctgccgcagcggccgttgccgtgcttggcgccaccgctcagaccggcgtcaacctgggcttcgctcgcgacttcctgaccttcgccacggtggatctgccactgccggagaacaaggaagccagccgcatgcagttcgatggcctgagcctgcgcatgatccgcgactacgacaccgtcaacgatcagttcctgaatcgcgtcgacatcctgtggggttcggccgttctgcgtcccgagttcggcgtggtcatcccgaacgacccgaccaatttctaa

SEQ ID NO: 535371 - DNA, 204 bp, Stenotrophomonas maltophilia
atggcacttccgtccgacaccatcgccgcagcggcgactgaaacccccgatggcaccttggttggccgcaatgccgactccaaggttggcttcttcggtgcaacccctgccgcgcaacccgctgcactgagcctggcaagcgtcaccgctgcccagttggctaccgcgctggccgcactaggcatcatcaagaccaccgcgtaa

SEQ ID NO: 535372 - DNA, 408 bp, Stenotrophomonas maltophilia
atggcgaaggtatcggaaattgtggctggcgctcttggtctgctgcgcgtgctggacgctacggaggcaccagaagccgaggatatggaaacgggtatctcggccctcaacatgatgatggtccgctgggaggctaacggctactcggttggctggtcgccggtatcgaaccctgccgatgacatgccgaacgtccccgaggcggacgaggccatcatgtataacctcgccgtcaagcttcgcccgcgatatggcgtggcgatggatgctgacgtttttgcagaggcatccaagctcaagtcggatgtccttgccgatgtcttcgcttcaagcccaatggagatggagcgcggaatacccgggttccgttgtcgctacaacatccgcagtgatgggtatcgctggtaa

SEQ ID NO: 535373 - DNA, 2388 bp, Stenotrophomonas maltophilia
atgcgcgcccaacctgttgacctgatcggcggtgtctacaaggacaccagccttccgtggtcgtgccaggacacggttaactggctgccggtgatggcagaggtttcgggcactcggacggtatccaagttctctaccgcgccaggcctcaagccgtggcagcaggtgggcaccagcccgatccgtggaatgcacgactgcgaaggtctgcgcctgattgtgtctgggcgctatctgtaccggatcagcaacgcaggggtaggcatcccgattgggatcatccccggtgttggccgtgtgcagatgacgcacaaccagtttgaaactggctatcaggtgctggtcgagaacgggcagggtggcggcgggtatgtctacaacacgggcgatggcagctttgccaggatcacggatgagggctatccgggttcgatctcgtcggactacctcgattcgtacatccttggcgtcgagccgttagggcgcttctggttccactccaacctcgccaacgcgaccgactacaacacgcttgatcggcatgaggctgagtctgccccggacaagatcgtggggctggctgcgaacgcgtctgaggtcgtggtcttcgggcagcggacgactgagttcttctacaacaccgggcaggctactggcaccttccagaaccgcaagagttcgattgcgcgcggctgtgcgtccaggtacaccatccagaagctggacaacagcgtcttttggctgggcgacgatggtgtggtctaccggctggatggatatgcggctcggcccgtctccacgcgcgcactggagaaggcctttgccgactccaacgtctcggaggccatcgcctacacctgggaggatcgaggccacaaggtctattacctcaccttcccggacgggcagaccttcggctatgacgtgatcactggtgtctggcatcgccgccagtcgttcggcatgtcgcggtggcgcctgagccacatccagaagtggggccgggattggtacggcggtgacttccagaacggacgcatctggcagatcgattgggactacttcctggaaggcgaccagccgatcatcagtgagcgcacgtccggcgtcatctcggacaaccaaagcgcgctggtaatcccgaatgccgagctgatcttcgacaccgggcatggccctgggacgaccccgattgcgttcccggtgcagccgacaccgccttcgctgtctggcgttgcgcccgatggcatgaggaacaccccgtacgcaggcttcacctacaccgccagcggcggcgaggcgccctatgtcttcactctggtaggtggaacgctaccgaccgggttggcgctcagcaccgggggcgcgctctccggcactccttcggcgctcgggaactacaccttcaccatccgtgtgacggacaagaagggcctgtgggctgaacttaccgacacggttggcatcgtcacgcagttcctggcactcggcaccgttgcgggagtcaccaaggccgtgacccgccgaaacttgaacggcacatggtccaacgtcaactctggtgttgttgctggcgcggtctatctgatgggtttgccgataggtcgtttcctggcgtggctgtcagccgctgcctattacagcgacgacaacggcagcaactggacgaaatcgccgtccaccattgactcaggcggcggcgaccgggcaggagactactacaacggcgtcgtggttctcggcggctctggcgcctgctacgtcagcacggacaacgggaccacgtatgtctcccgaacggcccctagcacgttcctgcactcggcacttctggtcaagtctggcgcgagtgctggccgaatcctgatgatcaacacgaatcccacggccaacaacgcatacagcgataaccaaggcgtcaacttcaccaactgccccgctcatggcgtatccggcacatccggcgggtcggcatacagcgatgcaagcttccagtacatcggcggcaatgtaggcgctggcggcaagccgatgattgccgtcatgcagaacggtgcaacgctggtccgcaatctgacgctatccggtgctgcaaacggctatgtgagctcgctaacgagctacaaggttggcgacacgaaccggcttctaatgggtacatccacgggagagctgtgggcgtctgatgatgcaggcgtgacggccacgaggctggcatacaccagtacgggaaggatcaacggtattggctttgacggagcgcgtttgatcgtcggaaccctgaccgcaatgaacatgatccaggtcagcaccgataatggcgctacctggaccactgagagcaacccatccgtaggtggcatcactgtcctggcggggattccctga

SEQ ID NO: 535374 - DNA, 708 bp, Stenotrophomonas maltophilia
atgtcactcggtgatgcgatcaaaggcgccgtcggactcggctcggccctgttcggaaactccggcgagaagaaggcggcgcgggcagcacagaacgcggctgaccagaacaacgccctgcagcgggagatgtacaacaacgcccgcagtgaccttggcggctacctgtcggcgggcaacaacgcactgaccggcctgaacgcgctggctgcgggcgactacagcgggtttgagaactcccccgactacctctatgcgcgggaccagattcagaaggggattgagcgaggcgcttcggctcgcggcagtctctacagcggtggaaccaatgttgacctggcaaacgcgatcaacggcgtatcgagccagaatctcggaaatcatcgcaatctgctgttgggcctggctggcatgggccagaacgccgcaggcaccatcgccggggtagggcagaacagcgccaacgctcagggtggcaacaactggggcgcggccaacgccgctggcaactcggcgatcaaccaagccaacaactggagccagctcggcgccggtctgggcggcttggcgaacaactggctgcagcagaacgcggcggggcggcagagttcgttcgtcccggccaatagcctgtggtcggggcaggcatcgaccggcgcgggcagcccttacaacttcggcaacaacctcgccaactggagggcctaa

SEQ ID NO: 535375 - DNA, 2142 bp, Stenotrophomonas maltophilia
atggctaatccgtgggacaacgatcccatcgttgaggccactcctgcgcctcagatgcaggctcaggggaacccttgggacgcagaccccattgttgcggacgacggccagggttatgaccagccgccgctcaacatcgacattgttggtggaaccagagagagcgatgtcggccgagctactcccgcactggcacagggcgaaccgccgaaagcttcactgttccgtgctgattctgatttccgggaacagtctggcgctggcattggcgacatgctctgggcggctgcaaaggacatgttcggaagtcgagagggggccgcaaaataccttgctgagcaggttggtggcactgttggccgcgatgccacggggcagccggtcctcactctgcgcaatggcacggcatatcgcctgaatgacgagggatttgactctacggacgcggcgaacattgcgggcaacgttgcggccttctgggtcccggccagcggcctagcccgtctagggcaggctcgcaacattggcttggctgggcgtgctgccctccagggagcaggcgctggtgcgacggatgcggccctgcaggctgcaacgaatgaaggccaaatcgatccgctgaggactgcagccacggtcgctggtggcggccttggcgaggttgcaggttcagtagttggtggtggaatcaaccagctcgcgaaccttgcacgttccggcacttcgcgaactgcggctaggaatgcactagccgatgttggggctcctgttagtgaagcatcgatcaatcgtcttgcacccctgatgcgccaagcccagagcggagccaatcagaatgccctgcttggtcagtctgagtatgggctgcaatacacccttgggcagcggctgaccgatcccaacgcccagttccggcagctgagccgcgaggaagttcttcgacagacccctggcggcggcgggatgttccgacagatggatgaggcgaatactcaggctgttggaaatgcccttactggactcagtgagcgccttggcgggggtgttgcacagtctcccgcagaaatggctagcggtgcggccgaggggctacgccagcaggctggtgcgcttagggggcagattggagatgcctatgatgcagttcgtagcgcatccacgacatcggttgctccagaagccattgcagaggtcccgcggcggttggctcagtcggtacgggacttcgatgtgaacccgcagacgatgcccgctgccgcgcgtgcgttgcagcagatctctgaggcatctgcaggggtgctgcagaacccggctgggggccaggtaaagggcgtgacgttgcgcgctctggaggcccagcgtcgcatcctaaattcggccatagggtcggctcaaaccccggcggatcgctcagcggtgacagctataaagaatgagtttgatagctggatggacgatgccattgaaaggtctttggcgacgggagacgcacaagccctggatctccttaagacggcccggggactgcgtgcagagtatgggcgccggtttgagggaggctccgactccgacaagttcattgctggagtcatcgacggctcccggactccggaggagttggtgaacatcgcgctgggtgcgggccaagtcagcaagagcagtgccgcgcgcttcattgatcggcttcgaactgctgcagccgacaatccggaggtagtgggtggcttacgagcggcccatttcgcgcgcctgacgaaggggaacaacggtgaggcgctgacgcctgggaagattgtctccaacatccgctctactgactacaacaacgccagtgtggtgaaagctctctataccccggagcagtggagcgaggtgcgccggtttgcatcggcgctggagccgctggtagcaaagggtgatttcgctcgcacatcaggaaccactgagcgccttatgcgagcgttcactgaccagttcgtcccgaaggttccgttcgtaggagatgtgttgggaggggtgcgaggtgctgccgatgcagtccgggcaggacgggcgatcaacgcccctgtgacgatgccaatagctactcctgcgacgggcatttctaccggcgtagctggggtgcaagaagtaacgcgctag

SEQ ID NO: 535376 - DNA, 783 bp, Stenotrophomonas maltophilia
atgagcggacgcttctacgacccgaacccggtctatttcaacctgctgagcaatcagccggtagccggtgggttcctgaccttttatttgcagggaaccacgaccccgaaaggcacctggtcggactcagccctgaccatccccaacaccaaccctgtgcctctggacagctccggccgggcgaacgtgaatatctggctctctggtgcctatacggttcgccttaccgacagcctgggcgcagtgatctgggttcgggatgtgaacgacggcgcgaccggccaggcccagttccctccgatggagtctggcaagttcctgaccaatgacggctcggtcaacctctggggcgacgtgcgccaggttccggacccgacgggctcggccaacaaggtcctgagcaccgatggcgcggccctgatctggatcgctcagcaggcgatccccgatctgcccatcgaggttctcgccaacgcgatcaagatcaagggaatcatgatccagtggggcaccggctcggcaccggctagcggcggcttctcgacgcagcaggcggttacgtttaccacgcctttcagtgaggcgccgtatttcgccatcccgagcgtcaacaatgccctggtcaccgcgtccagcctggcagctacggcagcgaccaacctgaccgcgaccggctgcaccttcaacttctccgctgctgacagcaaggagaacaactccgacaagatcacctcgccgatcccgtatcggtggctggcgattggcaaggtggcgaccagctga

SEQ ID NO: 535377 - DNA, 1014 bp, Stenotrophomonas maltophilia
atgcccattcctgccgaacagccccgattcgaccagccggtggtcgatgcgcgaggctttgccacgcagccgtggatgaactactggctccggatggcctcgttcctgagccaggaggacctatcggcggtcgtcgccgagctgcagcggcgcgtgaccgagctggaagaggggcagacccttggcttccagatcatcggggaccagtccatttcggtgaatggcgtcccgcagccagggcacgtcgtcatcatcacgctgcagggcgatcagcaggcgccaggcaatacgcagtactacggcaccggaccgaccggcaccaaggggtggttcccggtgtctggcgcgatcaccgtcaacgcgggggagctgaccaaggtcgtcggcaccgatggagtaaccaatcttggcctggcagacctagcaaactcaggcgttggcgccgcgctcgtcaagatcacccgagacgcaaagggccgggtgtctggcacgcaggcagccactaccgacgacctgccggctggcagcaccaacaagtactttccggaagcaccgaatgacggcaatacctatggccgcaagaaccttgcatgggtagctctcacggcgggcggttttgggccgccaccgaccgacggaagcccctacattggccttgatggtgcttgggaaaaggcgaacggctctgggtctcgcttctggctgatcgagtacccgctgctaaccgatcaagctggcaaccagctgacggatcaggccggcaacttcctgatgggcaacagccccatcatccccccaggctggcccgcatccacgactgtcatcaacaacgtgagcagcggcacgctccagtccatgacgctcgctgatgccaatgcgctgccaaatccaagtgacttccagatggtggcgatcatcgacctgaccggcggccgtgagccgtgttggtacgacgccacggttgcaagtgggacgaaatggcgccgcttctctgaccggagtatcgcgaactaa

SEQ ID NO: 535378 - DNA, 744 bp, Stenotrophomonas maltophilia
atggccctcgacccgtcaatttcgatcatccgtggtcttcaggcctcagttgcgctcaatggcctgacagtcagcgtcacgccgggcatgtgctatgtgccgggaactggccgaatcctgagcgacggcacggcaacagtgacgctatccagcccggcagcgaacacgttctatcatctatacgggtatgacgctggaggtggtgtcatggcgctggaggccagcactacgcctcccgacacgccatatcttggtacagcccggtgcaagaccggtgacaccacccggcgctatctgatctctgggcgcaccaacgccagtggagtcctgcgccctggacgacacacaaggcccggagagatgggcaatcgggtcatgctcgatgcggccagcgctgccgggtcggtgccggtgatgctgctttcaggtttggtcgctactactccgcagaccatcgatctatccactgtgatcccgatcactgcaactcgggcaatcatccagatcctgaacccaacaaacttcagtctgtacgtggcgaggtcggatgttggcgctccttcagcgacgaacttccagtgggtggcgttgccaggatcatcccccccttgcgacgtgactctggacgccaaccgacagttcacggttctgcttaatgcaagccttcccctcatcggcccaatcctgggcatcctcacggggtcggtgtcgatcacgctcgtgggttatgagttcgaccgctag

SEQ ID NO: 535379 - DNA, 807 bp, Stenotrophomonas maltophilia
atggcaaacgtaaagtatgccgatccttcatatactgacaccaacgcaaccgacgacgaccgcgtaatgcttcgaaccggagcaggcggcgatgcaagggctccactggttcagcccaagggctacatcgacgggctgaagcttgaatgggtgtcaggaactcaagtgcggatcacgtcagggtcagcctacgtcccgggccctaagcgaattgccgagttggcgtcatctgtcacgctcactccagccctggcagcaagcacttggtatcacgtttaccttaccgtggtctctggtgtagtaagcgcagaagccgtcacaaccgtaccagcggcggcctattacgggactgcacgtgcgaaaaccggagacacatcgcgtagatacgtcggcagcttcaagacgactgcttcaggcgcgatcatgaacttccggcaaggtcagaacaatttcgtcgcttaccttgaggctcagggagctgcacccacacgtgttctgaatggtggtgttgcgactgtggaaacccaagtttcgctagccgggatcatcccgataagttcaactcaagcccagattcgaattctcaatttcgtcacctctccgccaggcgcatacatgcttagtggaaccccagatgacagtgcatcaggccccccattgtcggggctatctgctgttgacccgaacaaggacgcgtatctcttgcatcctacggacctatcccagcggatcacttactggtttgcgcaggctccgactgcaggcgctgggtacattgacgtgtatgggtacttctatgaccgatga

SEQ ID NO: 535380 - DNA, 507 bp, Stenotrophomonas maltophilia
atgaagaacctgaagaccccgatggcgttggccatcctgctggccgccgccccggccgtgaatgctgctgatctgaccattaccggaaagatcgagcagacctcctgcaccgccgtcatcaatggtggcgtcgccgtggcgatgggcaagatggatatcgaagacttgaagaacaacaagcgcatcggtcgccgtgatctggatgtggaagtggcttgccccggtgccagtggctcgcacgatgtagccgtgaagttcagcggctcgtccaccgccgatggcgctcttgcgctgaccgccgctagcgatgccgaaggcgtagcgtacgagatctatgacagcaccgatacgctgctgaaggtcaacacagccccgacccagttcgtcaacgtcaccgacaccgcacctcagaccatcaaacatgcggtctggtatgccaagaccggcgctaccttggtggctggcgatgccaatgccaccgcgcagatggacatcatctacaagtaa

SEQ ID NO: 535381 - DNA, 1014 bp, Stenotrophomonas maltophilia
atgatggccttcttacaacgatctggcagccgttccaccaagcgtgtcgccggactgatggtgaccgcggggttggcaatgctgttctctgccacggcggcagcgtgcacgactcagggcaacagcggctccccgctccacctggtcatcgatgcctgggacgatgctgagcaggacaagatgattgcaaggtggacgcaggccggcaatgccttgttcctcggcggctgcagcggcgacgtcccctttgacatcaccccggcgatgaacggccttgagttcgtgcgcaccgttaccatcgacggtgagcagtatcgcgcctatgggctcgcgggctatccgcggtctccgttgctggtgttccgtcatgttgtgtgggccgccagcggcagcatccctgacgtttacacaccactggacattcaccggctgacgcaggtttcttcggggccgatgcccacgggtattcgaggctcgatcatccatatcggcgcggtgtcccgtggtggcatcatggagcgagtacctgccacattgctcggccccatcagccgtgtttcgccgctgtttccgcaatgggtgaagaccgatacgttcactgtgaccgccaacctgaaagtgccaacctgccaactgtctgatacgccggttgcgctggtcgatgtgggagtaggcgatcttccggccagtggccgcgttgcaggcgaacgcaccttcgacgtagtgatggactgcaacggcgccttcccggtggagatggtgcttaccgatgccaatttaccgggcaacaccggcagccgccttacgcccaccgcgaacagcaccgccggtgccgtgcgcgttgagctgctgcatgggggcgcaccggtagtactgggtcggccctggacgattccgctcacccagaacggaaagcagaacatcaccctggctgcgcgctattaccgcgaggcgggtacgttccatggcggtgtggtggaaggacaggcggtgattaccgccacttaccgctga

SEQ ID NO: 535382 - DNA, 750 bp, Stenotrophomonas maltophilia
atgatcattcgtgctcaggaaaatctgtgggcagcccccgtctcacgctcaccagaagaggtgctgagcttggcctcgctaacagtacaaggcctcgcactactgcacccatcgctgagaagatggtatgcactgccttcaagtcctaaggaagagtgtatttcactggacgattcgagtgcgctcctggctcgaatggagcaggatgttggcaaggatcgtagacggttcggtgattttgaaacgttgggtgcctcccttacgttggccaacgtggacaatgatcgggactggcgaaagccgggattggccgtgttggaattgaacccaacaacgggattcaattctttcagtctcgtcaggcccgagccctttggggaggcaacgccttttctgatggtcaacgctttaattgggctggtgaagataatacggccctcgttcgcgtgcgttgacgtgaagtccagaacgcccgacaaggggcttgtgacctatcaagtagagcgccgcctgaatcaacaccgtcagttcttcggctggatggggttcgttccagctcaggttgatcagacgcagctcacggacgcgcacgctgtccacgccgtcgacggcctgggaacggtgatcgtctcggtgccgggtgtgtttgaccccaccgacgacgcgcaggtggagcgcgttcatcggctcgaaagggatctggccagctacaacctgttgccggtgaccgatcctcacttcaagggctga

SEQ ID NO: 535383 - DNA, 567 bp, Stenotrophomonas maltophilia
atgctgtacaggatggagcgggatatccagaagacgcgtaggcgatttgggggttttgaggggtttggcgcttcactgacgctggccaacgtagacaatgaccgtgactggcgtaagcccggagtagttgtgctcagcctgcgtcccagccttggggtgcacacgctaagcatcgaggggctggagccctttggagaggacatctcctcaatcatgcttggcgcgatgattgagtcggtccaagtcatccagcctgatttcgcatgtaccgatgtcaagggaagatcgccggaaagcgaattgatccactaccagatggaccggcgcctgcaccaacaccttcagttcttcggctggatgggattcgttccagctcaggttgagcacgcacagctcccggatgcgcacgctgtccatgccgtcgatggcctgggtacgatcatcgtctccgtgccaggcgtatttgatccctgcgatgacgcgcaggtggagcgcgttcatcggctcgaaagggatctggccagctacaacctgttgccggtgaccgatcctcacttcaagggctga

SEQ ID NO: 535384 - DNA, 546 bp, Stenotrophomonas maltophilia
gtgcaacgagtgcctgctgaaggagggttcattggcccgccccgcaccgggcgctatgtcacccggcgcaatctcatcaactacgagtaccagctgtacatcgccaacctgcgctcggcaccgctgcgctttggattcatggtggcggacaaggccgatccggcgcggacgttcttctcagtggatacgttgtttgattacctgcaccggaaggggttctcccgtaccgcgcaggagtggcacttcaacgcctgtgagtttgatgggttctggttgaaggactgtacggtggtggaggctaagggtaggtatgagcactttttggacgagaacggaaagggcaagtacggcttcgttgaaagaggcatattcgagccttggggacgtcaaatgaccaggcagcgcgctgccatcagtattgctgagcctaacgggaagctcctgtggtgctttatgcaggtgcgaacgatggatgcagggataaacttcgccggtatcgatcccgctctctgcaagttcgagccttattctggagaagtcgcttga

SEQ ID NO: 535385 - DNA, 639 bp, Stenotrophomonas maltophilia
atgttcggcagggctgcgccctgcacctgcagaagccagtgcaacagccgaagcaacggcaacagcgggcattccgtgggatggcggggcggtgtcggagtgcggggacgccgtgaacccgtccatgggggcttggcagccgcttgctcgtgtgcgcgttcctgcgcacacggcaagaccggggttgggcgtcctgcccaacccgcccgaggcatgcctcgggcccatgcggctgacaccccgcactccgacaccgctccaccttcgacgggttcacgcggctgttggcaacggcggccgttggaacgcgcggctgttggtaggtgtcgaccttggtcgacacgattttcctgtcagatatcgaatgaatcatccacgcatggcgtggctctactgtgtcgaccaaggtcgacacccacccgagcagaacgccgttccggcagatcgcacaaatctgtcaaaggcggggtgggtccggtggcgggagtgtcagccgcatggatgcggctgccaagcccccatggatgggcttacggcgtctcccgccgccggacccaccccgccatcccacaggaagccagccttgacgttgaccttgaccttgcctcggcgggtgcagggcgcagccctgcaaagtaa

SEQ ID NO: 535386 - DNA, 852 bp, Stenotrophomonas maltophilia
atggctgaccacacccacaccatcgagctatcggccgggcaccgcgcgcttgacagtatcgctgccttgctactccacgactctcagccattccagatggtggagccagaagtcaaacgcgccagcgagaacaacccgcgcatcaagctgtacgcccccgatgatgaccgtcagttcccaacccgggaaagcagagtcggtcgaagccgactccgtggtctgaattgctgcattgaatgccacctcgtacatccggagatgcttgtaagcagtcgctatctgctggcaagcgtgcatttccggacgcttccgtgcatacgcctgaaggtcagcgagactggcgagctgagatccggtggcagcactggcagcagcccatccgctcttggcatcaaggatgtgcgcggaccagtcgcaaagctgccaagccgtgactgcgccattcactgcatggaagcaggcctcctcgatgagttcaccgtctctgcgttccgaaagggaccgatcaagccaaaaaatctcccgccccaactttcgcagcaggtcatcgggggatcgaattcggaaaaccttgtccagcgcaagaacggtgtttgccatttggacagctcgggcagtggatgtgggaatggtgccacaggcccagctcccgtttcgatgtccgcgccacgccaggccaaacaaaccgcgctcgttttactggccgagtgccgcgcccgccggcatggccacggcttctggttcgccttcaacgctgcacagcgcgcgcgaatgcgcgcctccacaccttcaccgctgccggcgccgccgcgcgcgccagcactgccggcccaactggacctgttcgcatga

SEQ ID NO: 535387 - DNA, 171 bp, Stenotrophomonas maltophilia
atgcggtttatgcagacgtatgacatggcttcgatttgtgccatgacggaatcgaacagcagagccgtcgccctgctgctcttcgaaacccaacgctatcaggggagccctcagctcggcccatcgcagatcctttgggaagcacgccaacttttcgagttgcttctctag

SEQ ID NO: 535388 - DNA, 144 bp, Stenotrophomonas maltophilia
atgcagtccgtcgtgtcggtaacgttgcttcgccagaccgatgatctgccgtgggacttggatgaagccgatgccagaaaggcggcgtcaggagagtcgaagcccaagaagaaggcatcaaggaaagaaaaagccccgcaatag

SEQ ID NO: 535389 - DNA, 3375 bp, Stenotrophomonas maltophilia
atgcaagcaaggaatctcacgctggtggagatcggcgtgggcgcgctgccgtccgcgtctccggtagtgcagcggttctcgacctggttcccggtgccgttcaaagccccggatgtgccttcggccaacggactgatcccgaaccctgtagccgatggcgtcctgattgaatggaacgccatcgaccaggagggcgtgatctacgtcatcgagcgcagcgaaagcgaacaagggccgtgggtcgagatcagccgcaccaccgaaacccgctacctctacagcgacggcagcggcaagaaatggtggttccgcgtgacgccaaccgtccgcggcaaggcgggagagggggcgattgttggagtcattcccccaacgaccagcacgggcctggccgagcaacaggccaagctgacagccgagataaacgcacgtattcaagccatcgcagacgaggcggcggcgcgcgctgcggggttggaacaggctgcgagagaccttctcgcggaggcacttgttcggcagcagggcgtcaccgaagccatgcaggcgatcagcgcggagaccttggcgcgcatcgatgccatcctcaacgaaaaaatggatcgtgaggccgcgattacccgagaggagcagctacggcagagcgcggatgaatcgctggcgcgcgctgtgtcggaggttgtcgccggcagcgggacgcagttcgacagcatcaagctgtggccgttcaaccaaggtacggaggggtggacgggaaacggcgccccgacgttggtcgatggctggctgcgacccgcaaaccacagcagcgcgccatgggtacagtcgcctgttgcggttgaagtggatggtagcgcctatcgctttgtgaagctgcgtctaaagcgtgtgggcgcaccgacatggaagggcctgctgcagtggatcaccaccgttgagcaagattgggacgcggcgaagagcgccagcgcgcaagagcctgtatgggacgccaatggtgttgccacgatcgacgtgcaggacgtggcatggtggccggcaacgatcgatgcgatccgccttcaggtgggggctgctcagaccgtcgccgactactacctcatcgactacgtcgcggtggggcgtccgcagccaggtgcgtcggtcgccttggttcaggaggagacccaggctcgtatcgcagcggacgccgccgaggctggccaacgcacggcgctggctgtgcagatgcgtggcaactatgaagggagtgacgtggcgggggtgcgctcggggctggtggccagtgagcgtgatgcgcgtattgacggcgatggggtcaatgcacaggcaattcagctgatcaacgctcgtatgccggacggaaacggcaagacagcgagtgaggcgagcgtccagcagctggcacaagccaatgcggccgagcacgccgcgatggggcagcagatcgatcagatcggtgtgagcctcggtgacaaggccgacagctcggttgtggctcagcttcggtcggaggtggatacgattgacgggcaggtgcgggcaaactcgcagagcctgatcagcctcaccgatcgggtggctttcgcggagggcggcgttgccgccaactcgtcagctatcagcgggcttgcatccacggtgagccagcacggagacaccatctcggcccacacgcagcagctcacgcagatcggcgggaaggtcactgatctggagggcaaggaacttgccaattcctcggcgatcagcgggctcacaacccaggtgagccagcagggcgggcggctcgacagtcaggcggatcagcttacgcggctgtcgtctcacattgacggtgtggatggaaaggcaaacgcgaacgcatcggcgatcagcgggctcaacacgcgcgtcgcggcaaatgaacagggccttgcgtctcaggcgcagcagacaacccgcctggaagcaaagattgtggcctcatcgccaaacctgctgcgcaacccgaagttcacggacaactggacgggttggaccatcagccccggtgtaaacattggcaacaacacctgggacggcacctatgcgttctgcgcgggcaacccgaacgactaccgctacctgattcaggcggtggcgtacagcggtggtgcaaaccgccctgtaaccgcgagtgtggacatgtaccggaacagcctgcggggaaccatgttcgtacgcgtagcgttctacgacgcggcggacaacgtactggcctacagcccgaccgcgaacatcaaccatccggtaggggagtggaagcggtacgaatccacgggcaccgttccggcaggtacagtgcagctgcgcattgagctattcaccttcgacaccgacacgaacaattcgttccgccgggcgaagttggagatgggcgcaaccgcatcgccgttcgatgagggtaagagcgtggacgcgctcgcgtcgggcttcagcaacctcaatgtacaggtgcagcagcagggccagagcatcgccgccaacgccacacagatcaacggtgtgcaggtggcgctaggcaataaggcggaagcctcagtggtggtcgagatggacgcccgtatgaaagacaccatgacgggtggcggtaacctgctggagaacagtcggctgctggatggcacgcagggctgggatcaacgctggaacccgggtgggtggaccctcagcgcgagtccggcgggcaccaattgggacccgcagggcgtgttgtcgttcggcggctcacgctacgccgccggcaacggtgacgcttacggtgtgtgggggaacaagcggcgcattcccgttgtacctggaaagcgctacttcgtgagctcgtacaccgcagcgcaccgatgctcggttcgggtgggtatcctgtatatggacgccaacgggaatcaggtcggcggcacctataccgactggtacaccaacccggccagtgcgggcggctcgctcgccaactggcggcgcatctacgcgagtgcggtagcgcccgcaggtgcagtctatgccatcgcggagttttggggctacgccaacctgtcggcggaagtgtcgcaattcttttggcatacgatgatgcagctggaagaggcgcagatggaccagcgcctgccggggccgtattccccggggggcgcggagggtagcgcctcctaccgcgtcaacgtccgcgctgacggcaaggtcggtggtatccagctgggcgtgaacggcggcgtgtccgcgttcgacgtggtggccgaattgttccgtgtgtcgcctggatccgcatcgggacagcgcacggagtacagcgatggccactggcggtgtttctacccgaatgggcagctggcaacacgcgtgggttggtggccgtag

SEQ ID NO: 535390 - DNA, 684 bp, Stenotrophomonas maltophilia
gtgccagcaggctttgaggcatacaccccgcaggggactgtgcaggtccgtagcgacttgctcaacttccacctccggcacaagttcgatatcaacgaagcaggtgcgatcgctcaccaggtgtcgggagttgtggtcacccgatacgtcacgcgcgacttccaagcgaagacccctgtggtggctgttactgggcccaattccaattttgggcttagtgtggtgctgacgagccttggcgggaacaactggcgcgtgtccgcctatacaggggcatctacggtgttcggcacggtttgggtctacgactcggtggtgaccgggacacccggaaagaccggtatcgaggtttatcgtgagcacaccggcgagcttgcctttgcctcttgggccaagcctttacgcattgtgggcgtggcaactgcgcccttcggcgcggcggaaggggcctatgtgcaggttccatctggcagacgctacggagtgatctcgtctcgttcttgccagcggatcgagcgcaacgtggggtttcggctgaccgggcctcaagggaacggcaccggctccggtagcgcggggcggttctattatgctggggccgctgcgctgatcccgcaggccgacaatgcgacacagttcagcgcgtcagggcatttcattctggttgatgtgaccggccactga

SEQ ID NO: 535391 - DNA, 222 bp, Stenotrophomonas maltophilia
atgaagatccaaagtgtcttgcttggtttgatcgttgccgccgcaggagccgccggtgctgtaggcgtggtccccgcagctaatgctgcctctttccacacgtcatgcgtgcctgccggcggcggcatggcccgatgcacgcagacgttctgccacgagggaacctgctgggtgaccgacacctggacgcagccgatgcgcgaagccatcgagttcgattga

SEQ ID NO: 535392 - DNA, 1008 bp, Stenotrophomonas maltophilia
atgtgtaaagagattgttattgaggtcggagccgaggcgttgcagaactacttgaaggatcttctttccgagatccatcaaaggccgcagaaacgtgaattcagaatagcgtcgaccactactgagttcgccaacgccctctcaaaattttttgagatgcgaagcttggtcgatgaggaggcggcaagtccggccgcctcaagtctcgccgctcggcttctgcggattgaagaagagactgagaggaaatacggacatctcaagaaggacaggaggttactaaataaaggtagctttcttcagtttgtgtttgagggggatgatgggcttcattaccttggcgtgaaggttgaacatcaattcttcttggacgagtctgacttctctaggcgtgtcggcattggcgagtcgcacaagatatacaaagcttgcaaaatttcctttgatgaggatggtgcggtttcgagtgccctggtatttgacactaactccagcccctcggcctactggtggagtgatttctgggagatggtcgaggttcggactgattcatataacacaaacatcgcaatttcggcggttgtgaaggcgctggggccgctgaaaaaggttgcgccatctgactatacagttcttagaaatgcatctgtggctgcttttaagcgagtcggtgatatggatttcgatgcgttcgtttctgaagtgatagaggggtacgaactttcggaaaaggccgcgtccagcaagttcaatgaaatagttaagaaaattagagggctgcccgccgcgaagaaattcgacagtcagtttacattggttccttcaagtgtttcatttaagaaacttaccctcccattgacgggcgagatttctgtgacatttaatgaggatatgtccaatatagatgataaaatatgggcgtcgtcgaccgtcgatggaaagggtgttgtagttgttgaggcggacaagtctgctctttctaggtttaagtacaagcccatggggtga

SEQ ID NO: 535393 - DNA, 1335 bp, Stenotrophomonas maltophilia
atgcgcgcgcatttgggtgagattgagttgagttctgaagtggaggtgcgattcaatgtcatcaagggaaaagggcttggttggatttctctgtacagtcaggaggatttggctagtcactggtcccagcaagcactgcgcgtagccgttgatgctttgtgggctcgcttcgatgacggagttaaatttgagtgttttgaggaaatatcatggtttggttcttcgtcgataggcttctatccgcgtgggagttctaaatctcgaagtcccgcggccgagcataggatgggcgagttggcggtttttaaggagaactgctatgcgcaagggcttggcggaggatggattccttcggatttctggcttgcgacacggtccagggtatcgggaataaatgatttctttgatcgtgtagcatccatactttgcattgcgtttctcgccaactcttcggatttcgatgcctctggaggccttgagtatcgtcttgttggttacaagtcaattgctggctcagttaattctgccattgcatcgccggctttgtcgtcactatataagatatatgaatgggcctacggtcctggtgcgagttcggacagaattggtctcgctaggaatgtgatttcacttcatgttgatgatatctctgaggtctcagatgaaagtggcgtgtggggtgccattcagtctaactatcagatatatcttaagggtaatatttcggcttaccttgaggttaagagcaggattgctgagcttctggtggacgcttccactaaagcgcatgcaacagctcagaatcttgttgttgctcttaaggctgccgtggccacgatggcggcatttattttgggtgttgtggtagttaatggtgtcaaggattcaggggttgagaaattcttttcttctgcctatctggtgattcttctggtggttgttattgtttttacgctttggctggagcatgagattcgctcggctcgccgagcgctcagtgactcggagttggcctttgaggagatacttgcgggtggttattcgaagattcttcacgtctccgagattcgtgaaagcttgaatcccattgcagagcgaaatagggcgttcttgaacgacgaggttgtgagaattcgtcgcgtgtggtttttgatttcgcttgtggtcgctgttgccttttccgcggggtgcttgttttatgttccggcctctagccctgaacctaaggcgcccgattttatgtgttatctctcggaatcagtgccccaagaaagcgagcggctgaaaggctgcttgtggcccaagttccaagaaggggctccggtctctaagtaa

SEQ ID NO: 535394 - DNA, 1275 bp, Stenotrophomonas maltophilia
atgcactgtattgatcagcagtttccgatatcgaagttgtgggtgacgcggaacgctattgatgagagtccagagtaccagcgcgagtctgcggtttggtctagggacaaacagcagctctttatcgactcagttctcaataaatttgacgttccaaagctctacttccacgatctgcgaaatgctaaaggcgtgcacgaatacgccgttgtcgacggaaagcaaaggctgtacgcgatttatcagtttctgaaaggccagcttgccctggcggatgatttcaggctgtacgagccgcgccaggggcatcaagctcctaatggtggtgcaaagtttgcggacctagatgagtattggcaggaggaatttaaaggcactgctctttcagtggttttaattcagaatgcgagtgatgatgatattgaggagttgttctcaaggttgaataacggtgagccgttaaatgctgctgagaagagaaatgcgatgggtggtgatatgtgtcgcctcatctcggaggtggctaagcataagttctttgcagagtccgtaaaaataaagaacactagatatcagcatctagagagtgctgcgaagttcctgttgatcgagaatactgcgctgtcaggtggtggttcttgcgctgatctgaaaaagcgcttccttgacgaattggttaagaagaataagaagctcgatgccgccagtaaagtgggccttgagcgcagggtggctgatcatctctccgctatgcagaaagtattttccaagagtgatcccctcttggcgaagcaagcttacctgccgctctattacatatttatcaagcgaattttgaccgaatatggtgatccaaagcttaagtcaaaaatacacggatttcttgagggctttcagggggtcagggtcgcgaatcttgacaagagtgaggaggagcgtgatagcgttcttatcgaatttgggcgccttatgcagcagggtacgaatgatcttaatagccttcagagtcgagttgcgatacttacgcgctacttcttgctagagaatcctggcgttaaactcaaagatgccaagcgtgggttctctgaagaagagcggttggctatttggatacttggtgggaaaaggtgtcttgagtgtgagtcgtctattgagctggacgagatgcacgcagaccatcatcagcaatgggcatatggtggggctacgactcttgagaatggccggagtctctgcatcgcgtgtaatacgaagatggctaagaagatcaattag

SEQ ID NO: 535395 - DNA, 2058 bp, Stenotrophomonas maltophilia
atgagcctaaatacctatctggccggaaggctgcgtaatacccggctgcctcttagtcacgcactccttcccgtatttgaggccgtagttaactcaattcagtcggtctccggctcttctggagagttgagtgaaggcgcccgaataactgttgacgtcattcgaacgccgcaggaaagccttgcgctcacattgcctgccaagcgtggtgtggcaccgcttgaagcaattgtaggctttcgtgttaccgacaatggatgcggattcaatgaagagaacttccgttcatttgaaacgcttgattctgatttcaaggcagcggaaggctgtcgcggtgttggccgcttggtgtggttgaaggctttcgactcggtttcaatagtcagtgattttgtcgagaatgatcagactatgatgaggagagtctttcgatttacggcaagtggcggaattgaggggcatgatcttcggcctgctccaggtaatatttcatccccgactacgattgtcgagctgaacggattcaaggccgcgtatcaggcgagatcgagaaagactctgcgggcctttgcaaacgacctgctggaacattgcctttggtatttcgtgcgggatgccggtgtgcccgacatctttgtcgtggatcagcaggactcgatatctctccatgattattatgatgaatacatgtttggctcttcttcctttgagtcaatcgccgtcggtgggcaagagttcaacctgacccatctaaggctcaaggcgaacgggctcaaggatgcgccctttctagcttggtgcgccgcgtcgcgtgtggtgaaggaggaggggttggttggcaaagtcccgggattgcacgggaggcttcaggatgagactggggactttgtgtatgcgtgctatatgacctcctccttcttggatgagcgcgttagatcggaacgaattggatttgatatagaggagatgtcagacgatttgttctctgacgacggtccgtctctagccgctattcggatagccgcacatgaggtgtctcagcgattcctctcgcggtacctggagaagagtgttttggctgggcgggagcgtgtccagaggttcatagagacttctgccccgcggtataggccaatcgttaggtggattgaccaggataagcttgcagtcgaccctttgatttccgaccgagatcttgaactatttctccataggcatttgtctgaggtcgaggcatctttgcttgaggaggggcataacattatggtgcttagtgattttgatactgtgtcggaataccagaggaagcttgatgaatacctggcaaaggccgatgatgtgaagaaatcggatcttgcgggttatgtttttcatcggaaggttattttggatatactccagaaggctattgagagggcgccttctggtggatatgcgagggaggagctgattcatgaggtaattatgccaatgaagaagacctcggatgatgtttcttctgaccagtccaacctttggctgatagacgagaggttggcgtttcacaattatctcgcatccgataagccactttcctccatgccaattgtcgataccgacagtggcaaagagcctgacctgctcttcttgaatttgatcgaccaacccttcctggtctcggaaggaggtggggcgccccttgcttcaattgtcgtcatagagatcaagcgcccaatgcgcaatgatgcgtctcaaggcgaggacaaagatccaattgagcaggcgttagggtatctcgaacgcgtgagagctggtggtataaagactgctcagggacgccccattcccaagtcggagagtattccagggttttgttatgtaatcgcggacttgactccgtccgttgagaggcgctgcaggttggcgcagttgaaagtaactagcgacggtcgcggatactttggctataacgacaactatcgtgcctatatcgaagtcatttcatatgatcgattgctggacggtgctcgagcgcggaatcgagcattctttgcaaagcttgggctcccgactaactag

SEQ ID NO: 535396 - DNA, 657 bp, Stenotrophomonas maltophilia
atgaagcaccttccgattgccggtctgatgctcctttcgcttaccgcctgcaacggtggctccgacaaacagggcgccgcgggcagcggcagtgacacgccggcggaaaccgcttcggcaaccgggccggcacagtcggcggatccggatctggccgcccgccccgccaatgacctccgggctgacagcccagcgcgcctggacggcttcgcaggcgccaagctgggcgccaacatcgccgaggtccgtagcggatttggagcgccgctgcaggggctcggcaccgatgcggccggcaagccgctgccggccgatgacaacagcgacgagtgctattacctgcacccgcagggggtcgaggacccacgcctgatgatcgagggccgcaagctggttcgctacgaagtgaccagcaccgccattgtcgcaccgggcggcggcaaggtcggcatgaccttgggcgaactgcagctgctgtaccccgagcgcgccgatgtcggccctgacaagtacgacgaccaggcccagcacctgcgcgtgcgcccggctcaggacggcgcggccatcatcgacttctcgctgtcccgcgacggcaaggtcgacggatggcgggttggccagaccccgcaggtggattacgtggaaggctgcctgtga

SEQ ID NO: 535397 - DNA, 6282 bp, Stenotrophomonas maltophilia
atggccgggaacagctctgtgcgacccagcaggagtggcgaccagtttcactaccactgggctgcgcgccaatgcttgaaactccttcctggagctacagacctagtcgcggtgactatcgaaggcgcctcgaatcaggaagccacggacgcttctcctgatggtgacgaggtcatcgacgttgccttgtactttggaagcgaggatatcccggcatcgcgccgggtccattacatccagttgaagcattcgacgaagcgcggcgacagcgaactgaaggccagcgacctgaagggaaccatcgccggtttcatcgccaagtacgttggacttctctcccatttctctgtcgacgacctcgcgaacaagttaagtttcgaattcattgcgaccagacccgctgattcaaaggtaatggaagcgctcgacgacctagctaatggcgcaaaggatcgccatccggccgtcaggaaaacgcttgttggcggcgcggcactggacgaggcacaaatacaagaattcttccagcttttcaggctccagcctaacgaagacgatctctgggtccagcgaaacctattgacccaagatgtctgcgcattcctgccagacgccgacatggatgcacctgttcagctgaaggaactcgtgacccgcaaggccacggcagagttcgagcgagaccccgcaattcgccgtcgggatgtcctgcgggcactgaagacctccgaggaggatctacgtccagccgaatcgcatatccctgacacgtcgggaatgtttccccggagacaggaacccgagattctgtcgacggtccgaacgacagatgtgcctttcgtgatccatgccgatggaggcgtcgggaagtcggtaatcgcctcccgcatatcgcacctgattccccccggatcggaggccgtgctttacgactgctatggcgaaggacttggtcgatccgtcctgcatttccgacatcggttccgggatgcgctcgtccaaattgccaacgagctggccgcgcgcggcctctgttacccacttatcccaagtacccgggcggacggaaaggcgtacatgagggccttcgtcagcaggctctcccaagccgtcgacttgcttcgcgcgcgggatcccgattcgagcctgtgcatcatcattgatgccgcagacaacgccgaaatggctgccgaggagcaaggagagccttctagcttcgtgcgagaccttattcggaccagcctgccccctggtgtcagactggtcatgacctgccgtacgcatcggctgtccagactgaacgcgcccccgcacgcgaagctgatcgaacttctcccattctccgaggatgaaacggcccgacacctcaggagcgtttatccaaaggcgacagaaagcgaagtcaaggaatttgcattcctgagcagctccaatccgcgcctgcaggcattggcgctatcccaggcccttccattacccaagatgctgaaggagcttggacctaacccgagtaccgtacaaacggcacttggcgaagtgcttgagaaggccatcgttcgcttgcgggacagggtcggcacggtcgaagcatcccagatcgaggcgatctgccaagcgcttgccgtgctccgcccgctggtgccgatatcggtgctggccacactctccggatcgcccgaaggcgcgatccgcagcttcgtcaccgatctcggacgacccttggtcatcaaaggcaacggtgtccacttcctggacgaacctgccgaaacgtggtttcaggaacgtttcagacccgatgccacgggcttcaggcagtttctagatcggctacaaccaatcgccgcgcatagctcatatgccgcttctgcactgccgcagttgatgcttcaggcaggtcttttgaaagagcttgtcgagctagcattgtccggaaagagcctgccggccgacaatcccattgaaagacgcgacgttgagacccagaggctcacatttgctttgaaagcgtgcttgatgcaaggcaacaacgtcgccgctgccaagctggcactgaaggccggtggcgagtgcgccggcgaagaccgacagtacaagcttatccaggagaacaccgatattgccggcgccatcatggcggccgatcgaatcgaggagatcgtatccaggcgggtcttcgggtcaacctggatgggatcacaccacgtgtacgacgcgggctttctttccgcacgtgaggaattcaatgcggaggcagcgagcaagctccggatggcaaccgaatggctgaagacctgggcttcccttccggaagaggagcggcaatatgaaatggtcacggatgccgaccgagccgaatttgcactagcaaccctcaggatcaaaagccctgccgaggccgtatggttcctcaggcgttggacatggcgaccacatgcccttgccgcaggaaggcgcatcgctcgtggccttgccgatatcggtcgattggaccaactcgattcattctgcatggcggcatcaaggaacgtctggctggttctaggcctggcaattgaagcgcgggagattggccacctgctcccggcagagccgattgcaagggcgctccgcctacttaccgaccggcgcattaagctggatggactggacagccaatggaacgacccttggcccatcctgcgagcggtctgctccaccatcgagatcgccatcaagatactgccagcggagcatgagaaatgggccagaacaatccgccgatacctgccagccactccacccaatgacctgaccagcagattcaacaatgggcgatcgcagctcttgcgtgcctatgccctcgaggcagcgcttcgaggcgagatcgtgaccttggatcgcctgttaccgccttccatcgacaagaacagcgaagagaagagcgcgcacagaaaaagtcaggagcgggaggtcttcgaccgggaagttggaggtctccttccttggttcgttcttgccgcagacatagcgtgtggtcgcaggcccgcaaatgtggatgaggcaatcgacgaggcgtgcatggcgacgagtcgtgctgaagcacgggtatacggacaggagcacacgctgcggcagacggctgctatcgaatggctgtgcatcctgcgggacctgtctgccagcgcccccccagaccccactgccctgagggagtggatttccaagcttgagcaaccgctttggaccgacacgcttatttcgctttgccgtctggcgggtcacatcgagggatttgacgactttgctctctatcttgccggtagtgtgtaccgagaccttgaagggtcacgggaccatgcggaaacgcgcgccgcgtcctatgtgagcctggcgcgctccatactgaacgtcagtccagcggaggctagcgcctgcttcaaccaggcgatcgaaatctccaatcgaatcggcgaggagaacctgtacaggtgggatgccttgctcaatctggcccaatcggcaggatccggtaccacacgacggccagaaacggcatatcacttatcgcgggcggcggaactgacgtacgaatacgtcgctcgcgacaagcatttcgcctggaataacacggtccaggcactgactgatctttgcccgccctctgcattcgcgatattaagtcgctggcgcgacagagggttcggtgacatgagccgcctgctgcccgaagtggtttatcgattgatggatagcgatcaaatgccttccatcgcctccatcgcgctttcgggagtggacgcctattggcgcaggcgcaaagaccttctgcgcgcggttggtcaggaaggtcgccccgaggtacggcaacgaatcgcgggcgtttcctatcgctacattcgcctgagaggccgaaaagccaggtcctggtctaaacttggtgagatcgcgaaggaatacgacctcgatttccctgatctcgaacgactccttgccaagagtgaaagggacgaggcgcttcaagaagccttgaaaaagcgcgctagtcgagcgtacttgggatcgccgcccaatgaggcgacagatacgagacatcgtccgaattggaacacctacttccaaggtgtcgatttgaccgatccagatgcgctcaggcttgcctatgccgaccttcgcgacttcgatccaccactcgagctagagaggttctttcgagaaggactctccagaatcaaggtgggtcatcgacccgacttcatcaacgcggtcgtaaagtggccggactttgggttgttcgaattaagttacctcttaaatgcagtcggccgacccttcccgacgttacagtccctacgtgcagccctgcggtcggcggtgctggtagcctgtcggaatgatccgacccgcgttaggtggggccgctggggatcaagtatcgacttccacgagctccatgaagcgggcatcgtgtcagatggcgacgtcattaaggctgcactcgagggattcacggcgtacgcggattcgatggatgcgagcgatctgttccagatgctggagccgctttccctatcaatcacacctgaggaagccgatgaggttctcaattacggcctgaagctactggacgatatactcaggccggacgacggagacggcccgtggcaagccgatctggcccctcccgagtcggtcatcggcgccttcgcgggcttcatctgggcgggacttgcatccccggaaaccgctaagcggtgggagtatgcccatgttgtccgctcgctagttgagctagggtggaccgaactcctcgaactgttgtttgcgtggctaaagcgaacggatgccgttccattcaccgatcgcggactcgagttctacggatggcatgcccggctctggttcctgattggagtcgcccgtggcgcaatggagaatccggagagcctacgaccctttgccattggcattcgagattgcctggaaatggatcacgtgctcatccgggacttcgccgcacgtacgctccggtcgctagtccatgcgcagatcgtaggcgaagagttcctggagtcgatcatggaagtcaaccaaccaaagctgccggagatcatcacaggcaaatggggaggccgagatgaagaagacgatgagcccgatgcccgggcctcggatgatgaagatagatattacttcggaattgacattggcccctattggctcgcccctctcggaagggcgttcggactgtcggaggagtcggtagagaagcgcgcgctacgcgcgatacgacaacatatgcgatggacgaagaacagcgactggagccatgacgctaggcatgtccgaaaggtgttccgcgacagagagacataccattcccacggcggcagtccggataccgatgatctgcgtgcatatcatgcgttccacgccttgatgttctcggctgcggaacttctccgcgagaagcctattctgcgagaccccgattcgccgacaaacgaattcgaggaatggatttccaaatatcaacttaccgatccatcgggaagatgggtgtctgaccgtcgggatccccggccgattggagaactagcagtccctagtgaatacacagaaggggaatggtgctggagcgtcaccgcggactacctagatcagcagcttacagcggaaaacggaatgacagtagtttccggaaactggactggacgcatcatcagagccaaggaggacgtatccatccgtagtgccctcgtaacaaaggacggagccgaagcattggtgtctgccctgcagacagcgcccgaacttggcaggttcagattggccggcgaggatgaggaacgtgatatagacgtcggtacaaagaagctaattggctggatcactgagcacagcacgccactccgactcgatgaggccgatccttggggtgagggcctccgctttccggggccagcgccgttcgacagcgttgttgaggggttaggtctggctggttctccggacagtcgccgatgggttgcccctgcgggtggagttctacacactgaaacatggtcggacacgaccggttatggcgacaacaaggagagcgaggccggctggcgcatgagttgcaatctggcattcatccgcgagctactcaaagccaactgcgggatgctacttattctgagtgtcgaggtccgccgccaccccaagcgggaccacgatgattgggaaagcgaacagttccactatgccccgtacagccgctactacttaatgggagaagacggtgtcgctcactcgctctga

SEQ ID NO: 535398 - DNA, 687 bp, Stenotrophomonas maltophilia
gtgtcgctcactcgctctgatgcaattgtggagctcggcaagcgcttggtcgcggaactgagtacggacgaggacctcctagcctcctggatggcacacgacatcgcggagaagatcgctgccaccgagagcgcgaaaggcaaggccaagacggctgccgaaacggcatgcgccaaggctatcctaatgctgtgggaatatcgcgactcactgccaagaagatttcggccattcagggagctggagcccgctctccgcactctggcctcgctggatattgatcgaaaggaaagcctctactttcccaaccatcttcgcgcggccgaagatgttgaacccgacgaacctgcgcgcacatggctttctctcgcgatcggccttgatcacaccgcccgaatattaattgcattttccctacgggaggccgctgcgacggcagcaaccaacgctattccatgggttaccctggcgcaagaggcaggcatacaagaagatgtcgaagaacccttgatcagattcgttcttgatccggatgagcggatggattcggaatcatatttggcgattaataaaatgaaagacaaactcgccaagcttgaagagttcatgagacttgcagccgtgattgctgatgagttgcgcgttcgcctatcagtattggatgacgtagagaacgaaccaatttag

SEQ ID NO: 535399 - DNA, 714 bp, Stenotrophomonas maltophilia
atgaaaagaaggatcatccttgcatctacgattctcagctcattgctcttctctgcacactctcaaccagtagcactcccccccgtcttggttaccgcccctcgggctggcggaggtgacttcaaatgcactggtaccgcctgctccaatgcggtcaatcaggaatccttgtctgcacatcaacgctttctggaggagaacgaccgctacccggatgagcctctcgagttggacactaccaaggtgtgtagaagcatgcgggaaggcaaacccgccaactgcaactatggttcaccaccatcggtaccgggattcgatgctgcctggaccgccaatggatgtggcacaggcccgcggtcgaactggttcttgagcaaggttctatcgtacgccagctcctctacttattccggtgaccttaatgccccttttccgggtgtcagcttccttgaagcgtgcaatagccacgatgcctgctgggggagcgcgcagcaccgggggacgtgcgatacgcagttcaggcatgccatggaatctggatgccagggcttgtccagccctgattcctacaacatctgcaccgggtacgcaggcctctatcatggtgccgtagccaccacaaatgaatcaaacgatgcctacgcaaaatcaatctccgcaaacgcgtgtgccgcgtgggtacatgacatgaaagccaacgggtgcaatccatga

SEQ ID NO: 535400 - DNA, 951 bp, Stenotrophomonas maltophilia
atgagcgatcgccggatggcgaacgttggatccaccctgtcgcacggacattgccatggcattccatctgctatcggaaaccacagaaagggccaaagcgagatttgcggcccgcgcctgagatgcagctacaagactgcgaagctcgggcgacctgagaacgtagttgtctacttgcagggcatacgcgccgagaagcacctggtcatgcaggtcttgtgcgccagcagcccttgcctcggagagcgcaaacccggccagttcgaggtagttctccgggagagagggcgcgaaccgctgccatcctctcagcatggcctgcgtcacttcacactcttccagcatcgccggatcgaaatgccacggcgaggtatcttgctcgcactgaggcactgccgccttgagatcgatgacaccaagatctcgccccagcaccaggatctgcgtcatgggccctgccagaaacgcctgctgagccgaatccaggcggcgccagagccatttcagtacccgccgatccgccaggcgaaggtatttgcgcccctgtcccgcaacccggatcgtgcagagtctggtccaatgtcgaatgacctggtcagggtccgagtcgaagccgatccagggtccgatggcaaatccgtgttccgcctcacgatccggatcccgctgctcctccatggcttccaggcaggtggtgtgcagcaacgctacgccatgagcggttgcttccagcagaagcaggtacggaaagcgcgatggctttttgtcacgaagcggcacattgatcctgagcttgcgtgctcccagctccgcgacgagttcatcatcgagtggatcacgcacgaacggatcaatgattgcggcagtccaacgcggctggcgcgcaccgtgcaatctttcgccaacatcccttatcaacgattcaagcgagcgatcattcatttcagataa

SEQ ID NO: 535401 - DNA, 966 bp, Stenotrophomonas maltophilia
atggatgttggcacggcgaaggagcgcagagatgccatcttcagcttcttctcggctgggcttagcgttgtttctgcgtttgttgatgttgctaaatcgtacgcacagaatcttctgaagaaggttttggcgaagcggctggaaatgacggttgcactatttgccgcgattggatcgttcattgattcggcgcagagttttatggcgtcagcggatgatttaaagaatggccgtggtgtcttcatcgcacatgtccttcaggcgatttcattctttgcgggcggggttgcgttcagtatctatgcggcctcactcattgtccaagggttcggtgtatcgacatcttggctcggctggggaatagttcttgttgttattgggtttgcattagggtttgttgcatcactctttatgactattcccattgaggactgggccgcgagatgtatctggggtgggggcggtgtcgcgtctaggtggcctacaaatgagatcgaactgcaagagctaaataaagtgttgctcgggatcgaagtcgacgcccaattccgaagctcgttgagccttaaaaaccttgcaagcatcgacgatgtcatcattggagaggcggtgcggagaatgactgcgcaggagtctgaggcgcaatttaccagggaatttgtcgtgaagctaaagctggttgagcagatgagaaagcggctcggagtctatgtttgcgttgctggtagagggaagtcaggatctgagactgtagccgtttgctcgacagatgcgaacggtcgtccgggagaaaattgggggcggggtgtgtcgaaaggtgcaattgatcatgcagcgcttgacgcactgactatctcggggcacgttgaaagcggaagattttccacgctctccgtcgagtttactatacgggatgctcttgaggatggggatgttattgttcaggaaaatgtggtgattgagtga

SEQ ID NO: 535402 - DNA, 921 bp, Stenotrophomonas maltophilia
gtgagtgctccatctaaaaggcacggaaaggttgttgtcgccgaatgggagggtgatgagccctactttgatactgagttcgcgcgtgcgcggagtcgaggaaaggctcaggttggtatagcccagccgaggagaatccttgggagtaccgattcaattagagtacacacgggcccgtcttcgtctggctcggtgatcgctgcgtatgagaatgggataatggtcggggggctcagggggggccttgggctttctgtacttgcttggtttggacttcttcctgcgttctgccttattctcgtgagtggatattgcatgtacgttcttgggcggattggtggcgctgctctggataacattggatttacattgggtgttgtttttgcaggtcttgtaagtggggtctttggcgttagttcctttagtgttttgcttagggctctggttttcatgccttccgacttcccggttatatttaatagatgtactcaggatgtgtgggtcccggttccgaaaatgccttcgttcgttcgaatatttgaaatttctccagtttcatttgaacgccacagttgggctagtctaaggccgcggacttatcgcattcttgaggttacgccgggcgcaagctccgctcgctgggcctacattttgacattggtctttggtcaagagggcgagccgcgaaaagtggcctgtgaaatgaatatcggcttcaagggctggggggacgatttcgagcttttgcaactttgggagcatattcgtctatacatgaacgatgccggcccggcattggacgaaggcgagaagttcaagaccttcagcacgggtcgacttcccacgttcccggatgaggcaatggcggcattgggacgaaagctctcggagccagaggcttgggccgcttcaaagccttga

SEQ ID NO: 535403 - DNA, 1110 bp, Stenotrophomonas maltophilia
atgaccgatacgcaacaatcatcccccagcactgaagttaacgtggtcttcaaattatggcttcaacagctggcagactccttctcatgggcagaaaagcaccccgtaaaactcgctgcggcctctatcgccctgccaagcctaagccttttctattacctacaagccgaacacatacccctcagcatactttcctcagatgtaatttcaggattgccgtcgcttttggtaattatatgcgccatcaccctgatgttatttgctcttgcattaatgccactcatggtcatgttcgaggaagctgacacctcgagtgatggaagcctacacgttctgaaacgatcatccgaagtagggttgaatatatttcaatggcttgggacattgatcttgcccggagcaatactggcaatcgccgtggtcctgatggcaagccaccccgggaacgacaaatggggcgttccagtatctatcgccctggccggactagtgttcttcttcgtaacactattcttcgatgggaacaagaagaagcgccactggcttgaccgcacgtggtctgccattacctcaaatcttgtccagatgatgtttgcactttctgttatgaagggtgcaatggaatattttcgtgaaatcgaaaaatattgggtgattcttgggctacttctctttgtgatggtaatggcggcattggtgcaattattcgccgtgagactcatcgagctgggcagcaaggatgggaagatcgtagcgcgagcgttccacgcaagtttgatcatcatcaccacgatatgcattttccccaccactggcggctggcttgccggaaaggtcatttctagcagcggctcaggcggcatgtcgtgctcacgcctgattgtcacgggagaaaaatcagatttcgccgaagtaatcgactggcgcgacaagactcggcctatcacgaaggaacttggcattcgggccgccacttcctccatgtactacgtgagactaaaaagtgatgccaaagggattgcaacgattcctgtcggccgtgtcgccaatttcgtagagtgtagttcagcgagcgaagcttccaaagcgtcatcgcccccgggcgcttga

SEQ ID NO: 535404 - DNA, 765 bp, Stenotrophomonas maltophilia
gtgtctcatggctaccatgactttggggacgacgacgaagttttccattacttcggcgagggccaggtcggaaatatgaagtacgtgtcgggtaaccgagcgattggcgagcacgtcaaggatggcaagacgctcgtagtgtttcagatgatgggtaagaggcggccctacaggtatcttggtaggttcatgtgccagtcctcctacgttcaacctggcacgccggatcgagaaggccagccaagatctgccatcgtgttccgaatgagatcactggaagcctcactgggcctcgcgccaagtgagacggaccaagcagagatcgatgccgctatcgatgacgttggcgtgaccagtacaagacgcgaaaccgaagtgcggacgaagcaacgtctgttccgcgagcgcctgattggcgttgagaagggttgccggttaaccggcattgaggaccttaggttccttcgcgcgagccacatcaagccgtgggctgatagcactcatagcgagcgcattgatggggagaacggtcttctcctggctccgcacgcagatctgctctttgatcgcggatggattagcttttcggcgaatggtcgcctgctcatttccaacgaattgccctctaacgtgcaaagtcggatcggcctgaagttggacccacctcgccaatttggcaccttctcccagaaacagctcagcttcctcaaatttcaccgcgactttgtctttagttcgtgccagcgccaaccaaatcctttgtaa

SEQ ID NO: 535405 - DNA, 837 bp, Stenotrophomonas maltophilia
atggcaattgagtgggcaacagcggggaaaattgcgtacgcggcgggcaagtttgcctatgtgcatagagagctgattcaaagaggctacaagatggcgcaagctcggcttgattgggggactactgatattgtggtgatggggcacgcgggagttggaaaatctcagttgattaatcatttcaatggcagcgccagagagcttcgttactctttgcctgctgagtcaatagccgttgaagttgatgcgctaaagtttggtggcagaagcaagctggtgcgaaatcttcctgggcaagctgcgcgaagaacatccgcggaaatcaagatctttgaagatgatgaagagcttgatggagttattttcctcgtggactacggatatgtagctccgcgagatcgcgctcttgcggcagcgttgttaaagaaagatggcttcgacacaattgagaagcttcgtgaacataatctgaggctggagctttcggactttgatgttctaaagtcaatgataattagaaagcggaaaaaacatagttatccatcttggcttgtaatagctgtaaataaggtggatttgtatggggataagttagatgatgctcttgattactaccatcctgagggttccggatcatttgggaggaaggttgccgagctgataactcatgtggggtcatctaatcttaacgttctcgttatacaggcctgtgctcatgtgcaggatttccattggaatgaagagattgtctccacgcagtttgaccatgcgtctagagatgcgctgctggtcaacttccaggatgtaatcagttctttgatcgaggggcgcggctaa

SEQ ID NO: 535406 - DNA, 1071 bp, Stenotrophomonas maltophilia
atgcgcgcacctattctgccgcggctgcttctgctggtgccgggagttctggcgatcccttcggctgcttcggccgaagatccgcttggcgcctcattcgccgagggcgactggttcatggcctgcgacaacacccgtgcctgtcgtatcggcggtgtcggcgccacggcaccgctgaggctggccgcgctgatcgagcgcaacggcgggcccggaacagcggtggagatccggctggtactcgcgcgcaaggacgctgacgaccccgatgcgcaggcgcagtcacctaccggtgcactgcaattgcagctggacggcaagcacaaaggcagcatcggggcacttgaaacagccacgcaacatgcaaagctgaccccggctcaagtgcaggcgttcagtacggccctcatcaatcagtcctccatcagcatcaccaatgacaagggccaggcatggtcgctgtcagcctccggtgcagccgcgctgatgctgaaaatggatcagatccagcagcgacttgatacgcccggcgcactggtgcagcgcgggcaccggccggagtccagcgtgccgcccgcgctcccgatgccgctgttggccgcgccgtccaagcgcgtgccgccgcgggacgacgatgaccgattgggcgagcgcgaggacctgcgccgtatgcttaagcccgacagtaaggcggactgggcatgcgctgaaggtgtgcagccgaccacctcgcccaccatcgccatccagcggctggatgatcatcacatgctcgcctcgctgacctgccacattccgggcttcaatgtaccggcaggtacatgggtgatcggcgaccgggcaccgttcaatcctgtcttcatcacccagggcgcacttttcgcgaactcgccggagacggtattccttgaagaaaccgtagagaccgaccaggatcgctgcgaaaccgggcgctactggacgtgggatgggcagcggatgcagctgagcatggaatacgtgggcggcacctgcagtaacatcggcgcttcaatctggcggcttccgatctacatcacggaatcccgctag

SEQ ID NO: 535407 - DNA, 1041 bp, Stenotrophomonas maltophilia
atgcgtcggctactgtccacactgcttgcctgcgtgctgccactcgccgccaatgcaggaaacccatcactggaacccggcatcgagttcgtacaccacgactggttcctggcgtgcgacaacaccggcacctgccgtgccgcgggctatggtccagagaccgccgacagccagctcagcctgatgctggaacgtgctggcggcccccgcacgccagtgaaagcgcggctgcggcttggtgaggacggtgaaagcgcaatgcctgaaggcgcgatgcacctgcaggtcaacggccgtgacctgggacccgtgcaggacaccggagctgatgacgcagtgacgctgcggccggcgcaggttgatgccctgctcaccgccctgcccggccaggcccgcatcgaggtgatcgacagcaggggcacgcactggccgatctccgatcgcggcgctgccgccgtgttgctgaagatggatgaggcacaggggcgcgtgggcacgcccggtgccctggtacgccgtggcacgcgtgccgaaacgagcgttccggccgcacacgccacgccggtgatcgtacgcggcatgctggtggcgacccgcgccggcgacagcgcgttgggaaacagcgaaacgctgcgcgacgcgctgattgctacgctcggcggcagcgacgactgccctcgcctgatccaatacaagggaccgccggaaatgctgatcgagcggctggacgaccgccatgtgctggtgcaggcgttgtgccagatgggtgcgtacaactacagcaatggcttctggatcgcgcgcgatcagcccccgttcgccccgcagacggtcacgctggaagcagagggcttctcgcacttcgagcgcacgctgtacgcacgctccaagggccgcggcatcggtgactgcgtgtcgggctcggactgggcatggaatggccaccggttccagcccagcagtgcgttcagtaccggcctgtgccgtggcatgccgggcgggcactggatgctgccgaccctggtcagcgaggttcgttga

SEQ ID NO: 535408 - DNA, 609 bp, Stenotrophomonas maltophilia
atggatgcactcgaggaaggacttctgcctgagagcatcgaggcattgagcatccatcttggcacggggacgttggcttggccgagcgttgtgctacccaatctcaggacgctgtatgtcgacgtgtcggcgcgcttcgacgcatcaagcttccccgctttgaaagtactctcgctctatccagacaagtcactgaagaatctcaggcaggccctggccctgcctctggaagaactgaacattctgaatgtccccgtgggtggtgagatcttcaacatcctgtctgcatcggctggtggccttgaacgactgggactgctgggtggcacgaagctgaaatgcctcgatggcatcgagacacttgccgcgttgacgtcggtatggctgaagaatctgggttcgctgacggacatccgtgcactggttggacttgagaagattcagaaacttgatatccagtactgcaagaagattgccaacatcgaggtcatcaatgatctttcggcgcttcgtgagttgacgctcgtgggttgcggaaagattggtctggagagaatacgggtaaagatcgaatcgcttcaggagcgcaccatcggggcgacgacctag

SEQ ID NO: 535409 - DNA, 4788 bp, Stenotrophomonas maltophilia
atgaaccgcatctatcgacgtatctggaatgccgcccggcagtgctgggtggtggccagtgagctgagctcgccgcgcggcaagcccgcgcagacgcgggtgctgatgtctgcacttctgctgacgacggcaggtggggcctttgcggccaatgaaacggacgacctggagctggcttcggaacccagtgctgaagcactgcgggttcagaaggaattgatccctctgttttccttcgctgcgccgaactctgtcgcatcggccatcgcaccgcgtggcaggtacgatcagctggcgattgtgatgagcggaaactacgcagacgcacaggtcagtggcgctgatgttctggcgctcggttcgcgcgcgaaggtctacggcaccgaatctactggtttgggcaactacgcagaaaccagcggcggatacgctacggcggtcgggcataacgccagggcctatggcggacatggcactgcattgggaacaagctcttatgccggttccaagggcgcaacagcgcttggacatgatgcccgagcaacggcaagcaattcgattgctatcggtagtggcgcaagtgcgtcctactcggagtccatcgccattggcgcaaattcggttgcctccggatcctggactgtttcggtgggatccaggggctatgagcgtaggatcacgaatgtaggcaatggcatgagtggtaccgatgcggtgaatgtcaatcagttggcagcagtggaaagtacagcaaacactgcgagaagcgtcgccaacggcgcgcaaaccaccgccaacactgcgaatcgcaatgcaagtgatgctcttgccaaatcaaatacactttcgggattgctcagccagacgtccagcagcggcaatgtccgaatcgggggagcgaacagcggaacgctgcttgacattcgcaacagcagtgggagcaaccgacgcatcactggcgtggcagatggccaggtgaccaacagcagccttgaggcagtcaacggccgccagttgtacgcgaccgatcgcctcgccatccgcggtgacgcaacggcgaccgcggcaatgcgcaaggctgacgcgacaacggctcagttgagcggcgtgtcgctggcgctggggcagaccgcgacggccagcagcagttacggaacagcgctgggggggagcaccaatgcaggtgagtatgcagtcgctgtgggttaccaggcattggccaaggcgaagaacgcggttgcgctgggctatcgctcggacgcatctgcggcgaacagtattgcgttgggtgagtacagtcgagcatacggtggctccagcattgcagtgggcaactcgtcccaggccggtggtgccggcgctgccagctttggttttggcgcaaacgcaagcgcagacaactcgttggcgtttggcggcctcgccaaggcttctcacactggttccgttgcgttgggcaatgattccatcaccaccggcatcaatcaggtatctgttggcaatgcgagcgtgcaacgcaagatcgtgaacatggctgatggcctcgtcgccaaggacagcaaggaggcggtgaccggcagccagctgttcgataccaacaccactgcgcagagcgctaaggtagcggcggatgccgcattgttgcaggtcaaggcctcttcctacctgttggccaacggtacggtcggtagcgatacaaccaaggcaaaggcaaccggcacgggtgcgctggccagtggcatctacaccgaggccagcggcacggctgctaccgcgatggggcgcacggccaaagcactggcggagggagccatcgccatcggcgaccgcgccggcgtcgaatctgttacctccaagcacagcatcgccatcggaaccatggcaaagaccggaccgcaggaagatctgctggccattggtcgcaatgccaatgcctccggcggggtcggggcgatggccttgggttacggcagcaccgccagccatctgcgttcggttgcgcttggttcgggctccacgaccagcgctcaggaccaggtgtcggtgggtagcacgagcatcaagcggaagatcgtcaatgtagccagtggcagcgttacctcgaccagcaacgaggctgtgaccggtgcgcagctcttcgcaacagatcaggctgcgcgtggcgcggaatctacagcgaaggaggctagtgaaaaggcggttcaggcacttgcgaaggccgcgacgctggagggcctggtcagcgaatctgctccgacgggcagtgttcgattgggtgcggcgaattccggctctattgtggacgtgcgcaacagtagcggcagcaagcgtcggatcagtggcctggcagatggcgaattgatcgctggcggagcggacgccgttaatggaggccagctctttgctacagacgagcgcgcgaaggctgcgcatgacgttgccagtgatgctgcttccagggttgcggaagtggagacgcaggccatgtactcatctgtgggtgccggtggcccaggcgtggctgcgcgcgctggcttggtgggagttgcaattggcgattccgctcaagcatcgctgaactcggagggcgcggtggccctggggagtttcaccaacgcggcgggcatgaattcagtcgcattgggacgcgctgcacgcgtgactgagtatgcactgtctggcttcgcactcggcgcaagttctgctgtcgacgagattgctggtctggcacttggtgccgccagctcagtgaagcgcggtgcggtgaattcagtcgctattggtgctggtgctgtggcggacgaagctcgcactgcgtcctttggcacaatcggacttgagcgccggcttgttcacattgcccgcggcaccgccgaccacaacgccaccaccgtcggccagttgaacgacagtctcgctactctcggcggcggtgccaagctcgacgccaacggcaacgtgattgcccctacctacacagtacagaatacccgtcagcgtacggtgggcgacgccctgactgttctggataacgcggtagtccgtagcacttcccgcatggatggcgtcgaaggtgagcttcgctcaatcttccaggagcgggttggcgttcagtccaacggtatcaacaccgttgcgctggccggtctcaatggtgccttgctcaccaatctggctgatggccggatcgcagcgggcagtcgcgacgcagtcacgggtaatcagctgttcgctgcggagcagaagatcgagcaaaaccgtagtgagttggatgcgttgcaacgagataggggctctgaacagttgcgtgagttcgccgcatcgcatgcagggaacacgatcgatttcgacggtgctcgcctgaccggcgtggccgatgcgcggctcaccaccgatagctcagatgcagtacgtggtagccagttgcattcgaccaacctgcgattgaatgtcattgaggacagagccggagactctgctttcggctggttgccggagggctcgcggaacgctgctgcagcgggcttggcgggagttgctataggtagaaacgccgaggcttcattgcagtccgaaggtggcgttgctctaggttcctgggcaaaggcttctggaaagaactccgtcgcattggggcgtgcagcggacgtcggcgtcaatgcagagagaggcttcgcgctgggcgttttttccgttgtagacgagtatgaaggcgtggcactcggcgctggcagcattgtgaggaagggggcggtagaggcagttgcggttggcgcaggttctattgctgaggagtcgaatactgtgtccttcggctccacggcaatgaaccgccggctcgttcaccttgccagcggcactcttaaccacaacgctgcaacagtcggccagctccgcagcgcactttctggcttcggtgccgaggtggactccgatggcaacatcatcggcccgcagttcaacgtgcagggcagcacccagtccacgctcaacgacgcgttgaccacgctcgatggcgccgtcctccgcaccacctcccgcgtcgacggcatggaaggccagctccgttccatcttccaggacaccgccaccgcccgtgccgacggcttcaaccagctcaccctcgccggtgcgcagggcatggtcatttccaacgtggccaatggcctgattgcttcgggcagccgcgaagcggtcaacggtggccagctgcacgcggtgcagcagcagctcaacggccgcatcgatggcctggaacagcgcgtagacggccaaggcccagcgccgcagtcgcgtgccatggcgctggcatccaccgagcaggaggcagtggcacccacgccgcccgccacgcaggacgacaaggtcgtcgccgataccggcaacgcaccgaagtcctcgcccgcgccgcagccgaaggccgaatcgcccgaatcacccaagccgcaggtcgacaccgccgagctggagaagatgctggcccgcgccaacgactacagcgatggcatcgcccgcgaagtggatgcgcgcttgaacaagatggacaagcgcttcaaccgcatggcggcgatgagcagcgcgcagaccgcgatggcgatgaacaccgccggcctggccacctacaaccgcctcggtgccggcgtgggctatgccgaaggcgaatcggcgatggcggtcggttaccagcgcgtattgaacgacaagggttcggccaccttcagcctcaatggtgccttcaccaacagcggtgagcgcagcgtgggcgtgggtgtgggtatcggctggtaa

SEQ ID NO: 535410 - DNA, 426 bp, Stenotrophomonas maltophilia
atgaatgaaatacgcatcgccgacagaaagcgcttcgtcaacgataagcatatccggacgaaaggccgtggctacactgaatgccacgcgcatctgcataccactggagtaggtccgtaccggttcatcaaagtaagatccgatctcggcgaattcctcgatcgctgggagggccctttcgatctcatcgatcggataccccatgagcccagccgcatgcctggcattctggcgaccagtcaattcgacattgaaccccatgccaagctcaagaatcgcggccaccctaccctgaagatgaatctccccctcggtaggacgagtcgtaccggtaatcattttcagaagggtgctcttacccgcgccgttctgaccgatgatcccaaccgcctctcctgggcctaccgagaaaccaacatcccgtag

SEQ ID NO: 535411 - DNA, 525 bp, Stenotrophomonas maltophilia
gtgccgctgattctgagccagggcgcaaccgcccagatcactgtctaccgcctgatcgatgaccgcctgcggctgcgcttgcgctatgccgacgacgggagcttggaggaccctgaggtgctgctgcgtatcgaaactcccgcggatcgtgctgacttccgcgctggtgcgcgttcgggcgtggccgggaacggtatcaatcgcgcactggcatcggttgagtccagcggcctcacggcgttctactttggctatgcccgcggcgacgcattgccacgcggccgctcatggcgacgggtaaccgtgctggaggtggatccggccctggccgggcacgtggcagacatctcgctgcagccaccgctggacctgctgaagctgaccgacctggattacatctggctgtggccgttcttcttctggaagatggcggcgctgttcctgctgattccaggggccgcgtcggctgtcttcactctggcgttgcggcgccggcagcgccgcaacacctgttttcaatcgtga

SEQ ID NO: 535412 - DNA, 1230 bp, Stenotrophomonas maltophilia
atgagcccggttagtgtcaaggctgtcatcgcagacccaagcgggcgggtgttgtttctacggaatccgcgaggcgaacttgagcttccaggagggcgccctgacattggggaaagtctggaagaaaccctttcgcgggaagtgcttgaggagtgtgggctggtcgtgacagacgctgcttaccttggtagccgctcctgcgcgattgttccaggaaagaacgtcctgctcgtattctacaggtgcgggcatactggggccgagatctgtctaagcgacgaacacacggacttcagatgggtggaagtagttggggctcggcgagaggatgtgcctgagtactactggtccgctgtattgcagcttgggcagcggtcgagtatagacgagggccagattttcgtgcgcgatctggagtatccgctagctaccggtgagcgggacaggaaacgccttctcataacggccgacatttacgatgccagcacagaagagttcatcgagccctaccttcctgatagcaaaggcaggatcttggaagtaggggctgggcatggatccatttcccgatggatggccaaggcgcgtccggattcggtcgtgttaggtgtggattcgagcgcgcagcaagtggacttggctacccgtgaagccgatcttctgggcatcgggaacgtcagctacatggtcgccgatctcagagagatcgaagagtgggatggggttggagacgaattcgatctgatcacgtgtcggtttaccctgctgcacctgaaggagcgcggtcggatcgtgaatgggttgctgagtcgcctgagtgcctccggcgttctggtactggaggagcctgcgctcgacagtgtcttctgctttccgagcgttccagcatttacccgcgccaattcggcgatcagaaggttcggtgagctgaatggacttgactacgactgcatcggagagatttggaaaatatccgttgagagtgaatctacgcttcgaggtgtgaatttcagtcagcccgccatctggtcccgtgctcacaaggaactcgtactgctgtctttcatgaacttcaagcctcgcttggtggctgagctcattcttgatcctggcgacgcggatgcgattgagatgtccctgcgaaatgaatacatggatgagcgcgtcgtctctggaggtctccgcactctccaggtcgcgctgtcgagggcgactgaggttggtgtatga

SEQ ID NO: 535413 - DNA, 858 bp, Stenotrophomonas maltophilia
atgacggagttctggattgaccaggcatgcagcggtgcctatgtggacgttccgaacgaggatgtggtgggttacctgttgcgaggggacggcctcttgatctgggcgattgatggggcgtctccgctaagtgaccagccattcacagtttttcctgacgagtccaattcgggctggtttgcgcgacgcttgtcggagtgcctaaaggtggaattcaatcagcgagcgtttgatacgtccgcgctggcgcagatcatcggcgagctcaagcgggagttcgatgaacgctctgagggtgccgctgcggagtggagctggccggttgctgcggctgtactggtggaaatcagcgaattcgagggccaggtggagatgaaggtctatcggtatgcagactgcttcttcaacgttgtgcaggacgatctgggggcagatgtcatggccaggaaaatcacagcggagcccgcttgtttcaacacgtggaagccagcatcaggattctgtggcgcaaagcttgaggccctgcggacaaggcgcgtgcagcagcagcgcaacgtggatacgagtgcgctgacgatcaactcggggagcgctatgaacgcaacggtgatctccttcagcgtcggcaggccgctacacgttctcgtcggtagtgacggcttggccagattgtgggaggtataccgcgaattggaggttaccgaggcaatgtcgatcgtggcgactgcaggtgtggcacgattggtggcaagacttcggcagttcgaggcatctcccggcagggctcggtcagatgtgaagccaatggatgatgcttgcggcattcatgtgttcatgccggcgctgcgcagtgggtag

SEQ ID NO: 535414 - DNA, 921 bp, Stenotrophomonas maltophilia
atgtccaaaaggagtgcgcggtggcctgcgctggatgaagaccagctggaaggatgggcatttcatgcatttgatctggtcagccggcttcgcaagggggccttggaaggagcgctgatagcggacgcgctctgtggacgggagggggccggaaggccgttgaagggcaatctggggctgatgaactttgccgcacgacgcttcgatgatgggctcattctcagcgatgtcattggaccgagctcccgggcattggcgaagatgatcaaggtggcccgtcgggagctggagtttgatgtcctcacctgtacatcggagggaatgttgaatgtgctgcgcagaggcaatgagttggagcccgactcatggctcagcagcgttccccggttgactgcgccccgctttcggcctcgtttccaggaaacgttcaggcgtccctcccgtcgcttgaagggtgtccaggcggcagcgcgattgcggattgcggaaaagagatcggagaagctgcgcaacgagaaggtctaccacgactcggaattcctgctcttgaactacttcgatctggcaatacgacgcctctatcgattcccgttctggaggcggatcgaaggagtggtatatctcttcacagagcggcgtccctgcgaggattgctgtcatgacatcacgcgcctgctccgtcgctatcgaaggatccagattgcgatcgtccgtgtcaccggacagggggcacggaagtggggcgcattggagaggctcgcagagcatcccagagtgcatatgtgcagattcgagtttctgccactggctgttgaagaattttcgccattggaagatcgtgggatggggccatggacgttgccccatcccgatggtacgccgcggagtggatgggtgcccaaaggggcaacgcagcgttga

SEQ ID NO: 535415 - DNA, 2793 bp, Stenotrophomonas maltophilia
atggtcgccccactgcgaaagggagcaacaggtgcgaccggagcgcccacatggatctcgactatggttgggaactggagctctaagctcactgcagctttcgatgagttcaaggtcccaagatatccctcactgaaagcactgagggacagactttcacatgggcaaccacttcccaacgacgggacggtagtggaggcgatcagctccgaactcggaaaacttctagataaacttgacgccatagctagcaacaacctcgtcgatacatatgtaacggtccgagaagacaagctcaacattcacaaacgcaaagagaagctcttctttgaggtttctcctgtatggacatggtctcaaacacttaacgcaatccagatttattcacacttttcaaatgacggaatccactacatagcgccagacggcgatattttctcagtgaattccgacccagccatcactcgcttcaagcggacattcatcggcgacggattttctgcgcaaaatgggctaggacgcctcgtcaaagacgtcctcgcggatgtaggcgcctacaccgaggactactcgaaaccaagttacttttttggggatggagaagaagcaggagttctattcgtcccttggaccaggtcgacgagcgaaagcaacgtgccaaggctcgacgcatttcggatcgggatagacgatagaaaagaatggagaatcaagggggacgagtgggtaagttacaccacatttttgaagcagatttcgaactgggatttcctggcgcgaaggctggcgattggcttggaaagctatgccaatgaacgagagcaagaagagatatcccgactgggctttccagcgagctcgggggtcagaggacccacgctgatcagagaaaagggagatgtcggaatatcaaccaacgagaaggaatttgacctagttgcgcgtatcgacgaatcctgcaggatcctgaagccatcgacctctgcgttcttcttgatcggacaagcggggcttggaaagacggagctaatggttaaagcggcaattgagcgggcacgaaccatcgagaagcagcctgactgctcacttcctctatatctcttcatatcatcttctggacgaacactatccagccttgaggatgcggtgaatagcgcgctaactatcacgaaagttttgtccagccatagcgcgaaggcactgtgtagaaatggccttctcgtactactggtggatggcttcgacgagcttctgggtagcagcggatacgagaacgcactaggatctctcgagccatggttcaatgaacttagaggcaggggcgtactggtcgcttccgcccgctcgtcctattacctaacccaatatcgaaaatctcttgcactcgccacgcatttgaatgttgaccacacgctcctcgaattgcaggcatggacaaaggcggattcgaagaagtacttgactacaatgggcgctgatgagggcgtattgaagtccgtgaaagaacgtgagtggcctgttctgagcgtcccattctttgcaaaagcattcgccgcctggctagagcgccaaagcgacgctaccaaggcaattccttcggtctacgaaattgttattgaacagtatctagagcgcgaagctatgaagctaagggatccaaatgctggcgaactccttagctcggatgagcttcgcgagcttttttcggaaattgccgagactatgcaatctacgacgagtcgcgagattgaacaaagcgacctcgtggcatgcgctgaggcagtagtcggcacttccgcactcgaaagaactcgacccggcttgacgcgaagactgtcttcattgtgcggactcggcgtcgcattagatgcggcggggcacagccagttcggcttctcgcatgaagttctgtttgactgtttcctctctctggccctgcaacgcaagctctctggagtcgtgagcgcatcatctgttttgagactactaagcacaagtaagattaaccccgttgccttcgaatggctcgttgagaagatgcctgcggcatcgggagttcttgcgcagagcatcgaattcacggtagaagcgggacaagagggaactgtgctggcatcgaatctcggcgcgctgtgggaagagatgatgggagcaaacaaaggcgtcccacccacacctcgcgctaccggcctacagctcgagaaacttcagccggcgaaggcaggatggaattctcttgatgtaagtcgcagcacgataggtgaactttcgatcccttcggaactgacagctgtcatcaatgtggcaaactcgacaatagagttcctcaacgcgaagtcgtccgacctactgttacgcactttatctggtgttgattcttcagatatccgaagtcttcacatcggagatcgctttgcggataatttgagcgagatccgcactactcttgaagacattggcttaattgagaagtcaagcacgctccagaactgctcctcccgccatcaggcgattagctttatcgcccgcctaacacgtcggtctgaaacaccagtggtactagatagggatgactacagtgctgatgaccagcgactctcttggattggccacgccgaccagggggaatgggtgaagttcgtggatgcacttgagcattcagggatcggacgactcgaggcaattccggcgtccgggtcagcgaaagttcgcctagccttcaataggccactgacggttctcgttgaaactccgccgggtccagaggcaactcgcttttgggcgaagtactga

SEQ ID NO: 535416 - DNA, 486 bp, Stenotrophomonas maltophilia
atgaacctgatgacccggctggccgcagcgctggccctgaccctggccgcgaccggcgcgcatgccgccaacgtgctggtggtgctgtccgacgaaaaccacctggacctgaaggacggcaaggtgctgtccaccggcttctatctcaacgagctgatgcagccggtcaagctgctgctggatgcgggccacgcggtgaccttcgccacgccgcaggggcgggcgccgacggtggatgcatcctcggtgacgccgacgtacttcggcaacgatgccgcgcagctgaggctgcacaaggacctgctggagaagctggcgctgacctcgccgacggcctcgccggtggtcagcctggcgcgcgtcgagcagcagggctacgcgcggttcgatgcggtctacattcccggtggccacgcgccgatgcaggacctgctgaagagcccggcgctgggctgggtgcttgccgattatgcacggcgggcctga

SEQ ID NO: 535417 - DNA, 522 bp, Stenotrophomonas maltophilia
atggctgtgcctaacattgtcgctcccatttggaagcccagggccgaatatccagtcaaggctactttgacctcccgattttgcgcggaactggatgcaatcacaaagaaaaaagggggtgcgactagtcgcatctttactgttgttgtgctctacccggaaaacaacaacgccgtcgatcccaacgccgtcttggtgatgagtcgacaggcgccgccccggccgctagggtatctgccgagcgtgatcgcggcgcagtaccgaatccgcatgaaagaggccggatactcacatctggtgtcggcatgtgaggcgactacttcgggtggtttggtgaccgccgacaccacgtatgactatatgctagaggtggacttggacatgtccgccgatcctgatccggaacatctagtgattcatcctgagctggtgcggctctcggccgatccggagttcaagaaggacgcaagtggcgcgtattgtttccattgctggtttccacacgatgccctgggcaggtga

SEQ ID NO: 535418 - DNA, 576 bp, Stenotrophomonas maltophilia
atgggcttgaataaggtggctgcggatctaacgggttttgatcgttcggaagtggcggccaacggctggtatgcctatcccgctctcagtcggttggcgcaagtcgcgcctttggatatgacgcaacagatgttcctggcacgctgcaagagtttgcacgaggtttggcagtgcgttcccaacggatacataaagtcattgttggagcgtgcaggatgcccgagtgccggtctcagagatctaggtagcctcaagctaatgcaggcactgctgaatgtcatcaaagggctgaatgctcacgaggagtcgagcgatgcttttgcttctgccgaagaacccgaaggctggaaagatcgcaatgacgctttggcgcccctgttcttgaacaatgagctaagaattgccgatgcgcacgagagcatcgagcgttgcttggcaaccctgcagtcgcttggcttcgatatagcgaacgtcaacgatggctatggatctgccttggactttgtcatggatggcgtcatcaaggcattggatacagtggccagcgccatcgagaagctcttagagccaaggtag

SEQ ID NO: 535419 - DNA, 141 bp, Stenotrophomonas maltophilia
atggttgtcaccgactggaaccgagtactcgacgaccccatgactggcctcaggctgtacctcgatcggcgcaccctctattcccggaacgacggccatgagcaaatgcaggtgctctgcctgttcgccatgcgggtctga

SEQ ID NO: 535420 - DNA, 1725 bp, Stenotrophomonas maltophilia
atgctccaaattgcaaccggaaagctcttcgctaggtctgtaagcagggagaatcacctgcgtggcatgctctatacgaatgctatcttcccaagagagaatgcagtcgagacagccgcgggccgattgctaccttcgtcgagctattcgatacgccccaccgtactggtctatgagctcaacgagcgcatggagcgggaggagagggggccggagatactcgtatcttccacggtggacccctatcttcgggattgttccgtcgtcgtgtcatttgcattgaactgcgtctgtacacccgatgtcgacctggccaggaggttgacgaatggccagaggggcttggttacagcgattgctccccaagcattggtccgccgattcttcgacgcggagatctggagcaagcctgaggagctgcagttcatgcaggatttcatcgaaaggctcatcgggttgccgcggcgaatcttcttgggcgtgatgcgagcgcttcgaacctacgtcaatgccatgcaccgcgttgccgatgacttggaactcgcatacacattgcttgtcgcatccgttgagtctcttgctcaggattttgacggtcatgagagcgattgggattcatttgacgaacgcaagcgcaaggccatcgatatggcattgtctggggccgatgctgcgacagtacagcgcgtcagggaggcactactcaaggtcgagcatgtcgcgttggctcgtcgcttccgggagttcgtggcggcccatacgccgccgacgtattttcgccaggtttctgatcttgccggtggtccgctgctggggcgatctgaccttgccgaggctcttgggacggcctatcaatctaggtccaaatatgttcaccaactccgacggctaccagacatcgtggcattgggacacggatatggtgaaacggcgatcgacggccgcactactcatctgaccttgcagggactgtcacgcttgatgcgtagcgtcatcattgaattcgtaatgcgtcagcctacgattggacgtgagccatatgactatcgtctggagcgaagtggtgtagttcaggtccgtatggatccacggtactgggtcggtcaaaccgaaggcgatgtcgcaacagctggccgcgacaagctggagggtttcctgcagcagctcgcatcatgtctacttcatgagcccggcgcgattctgactgatttgaatcctgtgctgacggctgtttccgaatccgttccacgcttgaagaagcaattccgattgccgtacctgaccctgtatgcgctgtttaacaagcatgtgatgaagcaggacactgtcgaggtgcccaaggcgattgaaacactgattcaagaggagctggctgctccttcctcagaagcgctggtcacctatgcgctacttggacaatccgttctatggaccttggaggagcatcgggaagctgtgaatacttacatgaggaggcgtgccgccgcggatcgtctgcgattcccacgactgtttgagactgcaattttacttgagttggcagagagacttcgactcgctggcgacatggagagctgtcgcgcagttgttgcgctcgcggtagagaaccaccctgggcatgcagggttactggaggctgagacaaagctccagagtgaaattccgatcagatggcgtgatgtcatgttgccatccaaggagcagtcgcaagaccctaaggcttga

SEQ ID NO: 535421 - DNA, 684 bp, Stenotrophomonas maltophilia
atggatgtcctgtatttcctcaaggatcgaacgaggatcattcgccagtactacgagcaggcagcgcttcccttcagtgagatcctgagaaggattgaagctgaagaggagccatacataccgacatacagtgaagacggagagcccccctttctcgatgagtggatcgaagccggtgagcttctggatatcacggggcgatgctgcatttcaatgctgtcggcctcattgcagctctacttcaggacttgggagtacgaactagggttgaattgcagcgaaatttgtaaggccacgttcaagacgaagggcctgatagcggggtatcgagcctgcttggcgaaagcggccagaatcgattggagttgctgcccggcagaccttcccatcatagagcaggtggtgcttgcgcggaaccgcgaccagcatccagagaacatcacaacggttcgcgtgacacatgccaagaaggattgggaaaagtacacgcagccgttcttcttgagtgaacgggaagtggggctgttccgggacggtgagacccccggtatattcatgattccagcacttcatatctcgcgagacaagctgatgacggcagtcaagcaagtggagtgcctatgcgaatggctcgaagatcaactgctcgatgccaagtatccctcacggaagcggcgcgattga

SEQ ID NO: 535422 - DNA, 834 bp, Stenotrophomonas maltophilia
atggtgattaggttcaatactgacattgtcggcgacatcgtccgagcgtatcttcgagacgcttccccggaagaaatgcgagacctgtacattcggcgcaatgtcttcgagatcgatccggacgctcccgtgtatcggatcgtggaactgcagtactttcacgaggatctgaccgacaagcgcttgacgcacaccaagatcgacaaggacaactggggagacaagtcggagaacccgttgctcggccgcgagttcaggctggccgacaccggcgagccattcacgctggatggtgtggtcggcaacgcctatgcctcttgctggtcggccatggcgttggacgcccgcgagcggtgggccattttctcccgcaaccaaccctcggtacgcctacaatccacgccgaggaaattgctcaacgcggtgatgagcagggacaaccagttctacatgcagcagcatgccatcggcaggatgcagtacgcagcagatggcgagatcgaggcccacttcgccgatccggactggcagaagcacctggacagcctcggccagggaatcgcggcctcgtacctgcggctgagcgagaacctgtcctacgaagatgaagtcaggctcatctacgatcattcccgcgacacctggccagcggcgcacgtccggcgggtgcataagttcgccaaggtgcccttcgattggccggcggcgatcgatgcggtgctcgtcggccccctcgttgccgatggcggcgaagccctggtgcgcggccagctgttagattccggaatcaattgtccggtgtcgagcagcgagcatcgaactggcgtcggctag

SEQ ID NO: 535423 - DNA, 750 bp, Stenotrophomonas maltophilia
atggggttctttgattacgggcctcggctatggatgatcggcgaggttgagccactgaaagcccttttggacgaagggaagcgtgcggccgtcattgagcggatcctggtcgagtacccgacaaggagggtcgggatggatgagaccttctatcgggtgcggaagagtcccgggtcagtggccgatcccttcgaatacgacaccccgcccccgaacgtcccacaggatggacgactgagttcagacgggctgcccgttatgtacgcctctcctttgatcgacctgtgcgtgcacgagtgccgttatacgatcgaggacgagttgttcgtcgcctcccttaatccacggcgggaactgcgcttcctcgatctaaccgcggttctggaagatgaggtgacagagttcgagagcctcgacatggcggtccatatgctgttccttggaggtagggaagcctacggcgcagcgcgggcgatagcgcgtgcggccagggacaacggcttcgatgggctggtgtatccctcgtacttcagcagccactaccacggtgaacgaccgtttcagaccgtctacggaatcacccggcgccgcttcggtggcgccaaggctcatgagcagtcattgagtgtcccaaatctggcgctattcggctatccgatcgcagagggaatggtggaggtcgacagcatcaatcggctggtgatcaaccgcgtggcctatgaattccatcatggaccggcaatcgcctag

SEQ ID NO: 535424 - DNA, 282 bp, Stenotrophomonas maltophilia
atgaatggtttggaggcacaacatgtcagcgccatcgtcgtagaactgggaatcctggctgaggaactgaaatacaccctcgccgtgatcgatgttggcgatgacgaagtctatgcttttctcaagagattgaaccgggcgattttagtccttcgagatggttcggaggactcggacatcgagtacctgaccaacttcctttgggagctgtttgccggttggtccatggtcactggctaccaggatggggattttgtgttggatcggttcgaaaggatatga

SEQ ID NO: 535425 - DNA, 204 bp, Stenotrophomonas maltophilia
atgctgaaggttatttcggactcgctttcgtttggcacgttctggcagccaaaccacgagcacatacatcgcctgactgacaagaatcccgaccgccatgttgaatatgatctgatttccagcaggaaacagcgacaaggcagtctcgacccaagtctcctgcaacggaccgatcagtggctcttcgctagctttgaacattaa

SEQ ID NO: 535426 - DNA, 504 bp, Stenotrophomonas maltophilia
atgtcgcaattccattctttcagtgccgggctgctggtccgtgacggccatggctgctatctgccagtatcggttgaacaggtcctggaggccccgtgctgggccatcgccctgaagatgcagcgcggtaccgagttcagttctccagagatcgtcaaggagtatctgcggatcaagctcgcaggcttcgagcatgaggtcttcgcggtcctgctgctggacacgcgtcatcggctgatcgaatacgtcgagatgttccatggaacgatcgatggcgccaaggctcatccgcgcgaggtggtcaagtcggctctacggcacaatgccgcagcagtgaacttctcgcacaatcatccaagcggaaatcccgagccgagtgcggccgaccgggccctgaccaagcggctgaagcaggcactggcattgatcgatgcacgtacgctggaccacgttatcgtcgctggccagcagactgcggctttcgccgagcaccgttggctctga

SEQ ID NO: 535427 - DNA, 330 bp, Stenotrophomonas maltophilia
atgagttggctattcttaatttcaattcttggaatcatcatctgctatccggcatatttctactttcttcatgagttcgaagcgaggttgaagcgtgatcatctggagttgtgcgggcgcaaaggtcctagagcttcttgggcatttgaaggtgcatacaaacgactccgcgcagtgaaaggagggcgtttggatggagtggtcttgagtaagagtgtctgtgactcgcatcggctggccagtcaattcctttacttggggatgactttctttctaatgcttctaatgctggggctctacgactcggtgtgggggggcggcaagcgttga

SEQ ID NO: 535428 - DNA, 714 bp, Stenotrophomonas maltophilia
gtggcgatcaccgatgccaatggccaggtgatcgagcgcacggtgtacgagccgtatggcgcggtggtcaaccggccgttggcggatgggccggggtataccgggcatgtgaccgactcggagacgggtctgagttatatgcagcagcggtattacgatgcacaacttgggatgtttatctcagttgacgaggtgacgccgcatgatcaacaggatgagcatttcaatcgttactggtatgcgcgtggaaatccgcaaaggtacctcgactcggacgggcgagctccaactgacaaggttgagccgcccccagagccgaccacgctgccaactgtcaacgcggtcgctccgccaatgccgatgcctgtcgcgccagtgagggcaacgccgacctcccttccgcgcatttctttgccagcgctgggtggatttgttgtcccgcgtgtggtgttgttgcctgtattgctgctaacacctaccgaaatgggggcgtctccatgcgaaatgccgggtggccccccttgtggagagttggctcagtactcaaagggaaaagagaatgtccgcgattcggggcttcgtgatctaacagatgaagaagtaagcaggcgtgctcgacagtcaggaatttctggcaaggagaagcggcgatatcagacagaggaaaaggctcgtggtcttaggaataaaacaaaacgtgaagagaatgggtga

SEQ ID NO: 535429 - DNA, 642 bp, Stenotrophomonas maltophilia
atgagccccttcgaaacgatcgccttggcgttgactggcaacgcgcttgcccttgcagttctaggttggcttgccaaatctctcatacagaaccttctgacgaaggatctcgcagaacaccgcattcggctagagcttgagaaccaacgagcctcgcaggcctttggtcatgagcttgcacttgccgctcaggaacatgacatcactttcagcaagcttcatgagcgccgggctgaagtagtagcgaagctttatgagctgctttcgatcacggcagagaagggaagcaactacgcaacaccgattagctactccaacgaaccatcaaagccagagctctttgttattttcgccaatgcattcaacgatgcggcaaagtatttctactctcacaagctgttcttgccagaagaatcttgcaacaaaattgaaaagctattcgaaggacttaaagcacatccatcaaagatgaatatctttatggggatggcggaacagcataaaagttcagaaatggagatcaaaagtctcgacgcatggaacgacgcttggaagtattttgtgcatgacctcaagccagccatggccttgctcgagcgtgacttccgcctccttttaggtgacaaatctcctgctgcatag

SEQ ID NO: 535430 - DNA, 219 bp, Stenotrophomonas maltophilia
atggagttcatgcggtgggccgtcgagcgccacgagttcccgaccgtggaggccattgttcggcacttcggcgtgagccgcgccacggcgtaccgctggcgcaacagcttgggcgaaacctaccggctggagaagctgccacccaacgagcatgagctgatccggatcggcagcccaggcgccgcagcgagcggcaatcactgtgccggggaaccctga

SEQ ID NO: 535431 - DNA, 300 bp, Stenotrophomonas maltophilia
atgagcgcacccaccgctccgagcttcgcggtaattgaagtgcctggctgcggcatgcgcctgcgtgccatgaaggatgagggtggctggagcgtgtcgggctggcgccggacgagaggcgcaacggcaatggccgtgtacgtgtccagcgactccgcgccgactttcatggagaccgccggccagcaccacgtcatcgccggtcgcacttacatcgcactgccgcccgcgagccagaagaagctgcaggcattcattgcctccactgagggctcaagcgctcaaggcggtgttgcgtga

SEQ ID NO: 535432 - DNA, 756 bp, Stenotrophomonas maltophilia
atgagcaacgacaagacaaccctggcggacgcgcagcccggtggaagagtaaggcttgcaactgtgccgttcgaccgtgcacacgacctgcttggcgacgcatacaacgccggaactcacggcatcggctacagccagcaggccacggagctgcacgacgcgatcatcaccgcccagccctccccgagtggtcagggggcgcacgactgccttgcgtcgacgcttggcgatctgtttctgcgcggctggattgacgatgtgtctggaaagttgatcggcgaagccgcacgcaaggacatggctgcggcactcgccgcccgccagccggtgatggctgtgccgcaaggctgcgatgcgtgcgatcgaaccggcatccgccagagcgatgaaggccgcaacatctgctgcccggactgcgacttgggaagggcctgcgctggcgatgccggccaaccgatgggggagccaacgatctgggtcagtcccgcccagctgtcggcccacaaggaccgcatccctggagacggcggcgcgtacttgccggcacgcctcacgcgcgacggacagttcaccaagccgctctacgcctcccccgcgcaggccgtggacctggacgagctgcgccgagccgtctgcgtggtcaacgtggtcggccagatcgacgggcacgacgtggtgcgccgcaactcggttctggacgtgatcgacgtccggcggcagcggcagatcgacagccaggcggtgggcaatggctaa

SEQ ID NO: 535433 - DNA, 228 bp, Stenotrophomonas maltophilia
atgaaaacagagggctttcgccgcacgctcaggggcgcgattgacgggcaccagttccacgtgacagttaccagcgatgaggaggaggtgttccaggtcgttgctactgtcgatggtgttgctgtcgatttgcggaatcatggcgtgatccgcaacaaaggcgacgcaatgcagcttgcgatggtggctgtggaacggcacatcgcggagctgggccgtaagggctga

SEQ ID NO: 535434 - DNA, 225 bp, Stenotrophomonas maltophilia
atggctgaccagctgctcatcgctgcacctgtccgcaacgtcaccagcgcgaagtttgtcgcctctcccggggccagcgtcctgactggacggttccagtgcctcctgtcctgcggacacatcgtcatccgccagggtgagcacgtccgcgggaccaggttctctctgcgcgctccccacaccgctccctgcaatcagtgcccgaaggaaatcacccatggctga

SEQ ID NO: 535435 - DNA, 195 bp, Stenotrophomonas maltophilia
atgaccggcgctgctctggccaagcacgtggcccgtgtgctgctgatggaatgcagggcacgccggcatggccacggcttctggttcgccttcaacgctgcacagcgcgcgcgcagccgcgccactgcacccgccccgatgccggaacggacccgcgcaccggtacagcccgcccaactcgagatgttcgcgtga

SEQ ID NO: 535436 - DNA, 411 bp, Stenotrophomonas maltophilia
ttgaacgtcgagcacatcatcgccgccgcaggtgaccggtcagcactggtcacccagcagcgcgcggccattgcggttgcagcagcgctcgaaaccgcgctgaccagcacgcatcccgccagcggcgccggccgcgcattgaccttcacgtttgccggagagccgcagctccaagccgcgtgtgacgcctggcgtgcatacgccctcgccaccatcgacacgccggcgccactggcggcgacagcgacccaacggctgacggcccagatcggcctcgccctcttcgatgaccccaccatggacctgacacagatcgcaatccgtgtgaccacggcacggtcggattcgcagaccgcgctgctgccggcgcccaccaatgaagtaacggaggcccgagatgggcgcagctga

SEQ ID NO: 535437 - DNA, 1230 bp, Stenotrophomonas maltophilia
gtggcggcaatgttgccctacattcagctggaaccccttgccgtggagattgcgatgcgccgttcgctgctgttgtccgccctgttgctggccctgcccgcgcttgcccatgcccaggacgggcagcgcccggaagtgaccgccgccgcgcagcggctgcaggcccgggtagttgaatggcgccgcgatttccaccagcacccggagctgtccaaccgcgaggagcgtacctcggccgaggtggccaagcgcctgcgtgcgatgggcctgaagccgaagaccggcatcgcccatcacggcgtggtggcgatcatcgaaggcggcaagccgggcccgaagatcgcgctgcgtgcagacatggatgcgttgccggtgaccgagcagaccggcctgccgtttgcctccaaggccaccgaccagtaccgcggccagaccgtgggcgtgatgcatgcctgcggccatgatgcgcacaccgccaccctgctcggcgtggccgaagcgctggtgtcgatgaagaaggacctgccgggccaggtgatgctgatcttccagccggccgaggaaggcgcaccgccgccggaagagggcggtgcggcactgatgttgaaggaaggattgttcgccgatttcaagccggaggcggtgttcggcctgcatgtgttctccagcgtgcaggcagggcagatcgcagtgcgtggcggcccgctgatggccgcctcggaccgcttcgggatcaaggtgatcggccgccagacgcacggttcggcaccatggaatggcgtggacccgatcgtggccaccgccgatctggtcggcaccgcgcagaccattgtcagccgccgcgccaacctgtccaagcagccggcggtgctgaccttcggcgcgatcaacggtggcatccgctacaacatcattcccgatgaagtggagatggtcggcaccatccgcaccttcgacgaaggcatgcgccagcagatcttcgccgacctgcgcaacgtggccgagccgccgctgcagatgggcgcggaagacttctcgttgtacgcgaaggaagtgccgggcatgttcttcttcgtgggttcgaccagcgtgggcatcgacccggcgacggcgccggccaaccattcgccgaagttcctgctggatgagaaggcactggatgtcgggctgcgcgcattgctgcaggtgagcctggattacctgcacggcgcgggcactcctgcgggctga

SEQ ID NO: 535438 - DNA, 816 bp, Stenotrophomonas maltophilia
atgtgtataagagacagtcatgggaggaacgcttggtggcggggcggttgggggcgacaccggcggggaaggcgcgaccggtcccacgggtcctacggggcttcccacgggtggagaaacgggaggcgtgaccgagggggtgacggggggcaacaccagcggcgatccggtccattcgccccccaacaatccgctgtggtagacgaagaccacgcgcgatttgtccgcacacgtgctacccagcaaccccacgtcgagctggccgccggtgtttcgaatcaccgacacgtccgacacctgcgcgtcccacaccccgcccgcgttggccgcgaccagggccacgcacgcttgacgaggaaggccggcgtagctgacggagaacgaatccccgaagcgttcgacggtgtagggctggacgttcaccgcgccgccccacgcgttggtcaagacgctttccccggcgccgagctgggaatcaggggccaaaccatcgaccactatggccgtggtgctcaccccgcggaatgtccccaccatcccaaaactgctctcgatgcgtcgggacagctcgcgcaggttgcgcgtttcgctggccagcttggcctttgcatcgacctgcccgaagaacaggaacatcgtgcccgtggcggcggtcacaacgcccagcgccagcaaggcctcggtgagggtgaagcccaacgcgctgcgcacgcccttggaaaggcggttgcgggtgggcgaacagcgggggcggatcgtgtgcatcatgcattcagcatgcgatgcacttgggattccgcaagcccctgtttttag

SEQ ID NO: 535439 - DNA, 393 bp, Stenotrophomonas maltophilia
atgatcaatcttgcgctgcgcccctatcgtctattcgcctgtttcagaggacgatcatcgaggcgagagttctggctgttctttcttcttcaactcctggcgaacattctgatcgttggggtaatcgcatacgcctcccgccgcgtgccgcccaccgcgcccgcagaaggcatgcgattgaacgatctgcttgcatacgtctggtttggctacatgctgttgaacgtcatcccgttctacgcgcttgtcgcgcgcagattccgcgatctcgggcaatccgggtggatgtgccttacgctcatgatccccgcaattggacccgcctttgtgttgctgcagatgcttcgcctcggccaagagggcgataacctctatggacctgcgccacgctag

SEQ ID NO: 535440 - DNA, 252 bp, Stenotrophomonas maltophilia; identical to SEQ ID NO: 533572

SEQ ID NO: 535441 - DNA, 801 bp, Stenotrophomonas maltophilia
atgagcaccagaatcatcggcccgcggccctggcttgggcccggcatgggagccggtaatggcggcgtggatgaagacggcaatccagtggaaccctatggcgggccgaccaccggtgacgtggccgatggcattcgcgatgttgtgggcgatatccagcagcgggtgcgcggtaaagccaagccggatgcgcgcgctgagccgacggacaaggcgcgggaggtggactgctcgcagatgcccgacgagaccgcgtgcaacgagtgcctgctgaaggaggggttcattggcccgccccgcaccgggcgctatgtcacccggcgcaatctcatcaactacgagtaccagctgtacatcgccaacctgcgctcggcaccgctgcggttcggtttcatggtggcggacaaggccgatccggcgcggacgttcttctcagtggatacgttgtttgattatcttcaccggaaggggttctcccgcacggtgcaggagtggcacttcaacgcctgtgagtttgacgggttctggttaaaggactgcacggtggtggaggcgaaggggaggtatgagcattttcttgatgaagaagaacagccgaagtacaggtttgtggtgcccagtgtctttcagccatggagggagcagatgattcggcagcgcgcggcgattgcgattgctgagcctcaaggaaggcttgtatggtgcttcatgcagagaagggcaatggcagcagccattgaatttgctcgacttgatccgttgatttgcagatatgagccatttcgggggggcggtatatga

SEQ ID NO: 535442 - DNA, 570 bp, Stenotrophomonas maltophilia
atggcgcgtcttgaagtcaccctggatacggcaacgcccggactggccgatgcagtgcggcaactggaaggcgaggcgcgccaactgatcctgagagactggggcgagtacctgctgaggtcgacacgcgagcgagccaaaaaggaacgtgacccgaccggacagcgatggcgtgcattggagccaagctacaagcgctggaagcagaagaagcgccctggtgtcccgattctgaagtttgatttccacatgctcggcgacatggcatcgtggcaaacggatggaaatgaagccgtcctggttggcaccaatgcgccctatggcgccatccatcagttcggcggcaccatccgtcacgcggcacgtcccgccaagatccacttgaagactggcaaaggcggtagccggttcgtcaaagccaatcgcaagaatgcgcgctacaagcgctcgatcacgatgcccgcttacacgaacaccatcgctgctcgcccttggcttggcgtcagtcgcgaggatgagaaggagctgctggatatcgcccaggatcacgtgagcggcgccttcaagtag

SEQ ID NO: 535443 - DNA, 1479 bp, Stenotrophomonas maltophilia
atggtcgacgtaaagatttctggcttgccggccgcagaagcgctgacaggtaacgagctgctcgctggcctccagggcaccaagaacgtgaaggttctggtcagcgcgattcgggctggtctggcagctgatggcaacgtggtgcatacctctggtacggagagtatcggcgggaccaagactttccaggcctacacctatttttcgggaggtttggcttctgatgcaaccatcacgattcggggcgatgggaccggtgccgctcggctgatgcgaatcggcggtacccgaaccgcagacggtccggcttacttcgaccttgtggcggaggcaaaccgctctgactacaacactcgcttctatcgcagcggtggcgtagatggagacaccaacatcaatcatcgtggcgccggcgtgctggcattgaacgctgagaacgctggttccatcgacttgcgcatttccggcaccagcgcgatgcgcgtcaattccgaccggtcagtcaccttcggtggcaatgctgctgcgatggcggctacccgcgccagcctgggcgcggttggcctgacgggaaatgaaacaattgctggcactaaggtgttctcttccgaagttcggattcagagcgtcgccccctctttctggctggatgagacagacggtgctccagcttcggctggcgtgaatctggtggttgatggggggacattccaagcccaagtgcgccaaggcgggtttggcccatacgtacgcaggctgttcaacatgtcgttggacggaagtggcgtaagtttcgatgcagtaacccagccttgggcggacaacacgcacaacctcggtgctggcgggcgccgatggttgaacttgtacgtggtcaacgcgccgatcaccggctccgacaaaacgaagaagaagaacctccgccacatgaccgatgccgaagaagccgcgttcttagagatcgcggagctgccatcggtctgggagtggaaagtcggtgaccgaattcacggtggtccgaccgtacaagacgctcgcgacgtgatgctggatcacggcctcgacccgtgggcctatagctgcttctgccatgacagctggccggcgaaggaagcagtctggcgcgagtggcccgcgcaggaggaagtctgggaggagtggcccgccgaggacgctgtctacgatgtggtacccgccagctacgatgatgatggccaggtgctgacacctgagatccgcatcatggtttcgcccgcagttgaagccgggcgacggctcatcagcgaggccgtggaagcgggccgcgagctggtggagcctgccgtagaggcgggcgagtccttcagcttccgcgtgggcgagctgcacgcatggatgctggcggcgatggcacgtcgggaccgccgcgagcgagaggcggccgaactgcgcctggccagcatcgagcaacgcctggctgtccttgagaccgggaagtag

SEQ ID NO: 535444 - DNA, 624 bp, Stenotrophomonas maltophilia
atgaatagtgtccgccgaaagatcgtgttgaagaaggtgttcgtaagcgtcgttctgatcgggttggcgctgtttgctttggcaggcctggcgctcaagttcatgggtttcagggttgagtcgctgccgccagacccccctaaaccacgcatcattgagcctgataccggtcacgacattaccgatgctccgccggaaatgcatctgaagattggcatcgccaactattccgacgaaggtcttggaaaagtcttcatcaatgatgcgtggggcggcggcatgcaaccgtacgccagcagtaacggacgcacttgctgcgtgacgctccctcgtctttggcatccgggactcaaagtcgcagtggcttaccgcaccagtagcatgtttctcaaagatccccacggctatgttgaaaaggacgttcttgttgcgccctatgagccgtttcttgatgggttcatttatttcttctactttccgggtgatcaggtgcgtgtcgtggccactccctactccccaggatatccgggcttcgcctacgacattgacttcggtgatggacatggtgatccagcaaagattaagagatttttggaagcaacagcgggcaaggaggcggaatag

SEQ ID NO: 535445 - DNA, 417 bp, Stenotrophomonas maltophilia
atgacgcttcagttcgtccatggcggcgtggatcgcgacggtgcaccgctgcatttccacatccgcaacggacgcatcagcggcttgaacgcagagggcgcgccgcgcgaaggtgcagaaagcgtcgatctgagcggctttgccgtcctgccgggtctggtcgacggccatatccacctggacaagagcttcgtgggtgaccgttggcatccgcatcagccggtgaacagcctgcgtgagcgcctggcggtggagaaggcggcggtggcgggcgccgcgccgatggtcgaccgggccgaggcgctgatccgccagtgcagcggcttcggcacggtggcgatgcgctgtcacgtcgacatcgatgccagtaccggcctgcgccatctggacgcggtgcgcgaggcggcgctgcgctga

SEQ ID NO: 535446 - DNA, 762 bp, Stenotrophomonas maltophilia
atggcctgggcgacgccggaacaagagaagctcttccgggagacagcagaaagagcgtttgactatgctcgccaactatcgcggatcgttgctcgcccgtcgaccatggatgattttgtccactggcatctctggaacgatagcgtcatcaatacccaccgagtgcccagattccgcgtccgaaccgacattgtcgtgcaaaccaatcaaactcctccgcgcactggcatctacgtcgcaaaagacaaccccatggcttcacttcagtttgcctggacagggggatacggagaactatgcccagccatggcgctcaatgatattggaagagcggtcctgaagcaggttgggcgcgatggactatggggagatgcagcagcgctgtatcgcttcctcgacgcgaaccggcatcttgacccctatggttggtctgacgtccaagccgcgctggcggaactggcagcgtcaacgatcgccgtttcggcattcgatctagaagattgcgagtggcattttgttgaaccgatccccgacgcattcgaggacatcgacggcagctacaccggtaccgatcagccggatctccggccagaccgagtcgcagccggaaagcgcgcgcctgtggccggctggtggtactcgcctgcacaaggcagcaggcgcttcttcaagcaaggcgatgtgttccccgccatcaacagcgactggggtgacacctcctggatctgggccgcagatcaggcgccgccaccaatgcgctga

SEQ ID NO: 535447 - DNA, 492 bp, Stenotrophomonas maltophilia
atgaaaatgcgcttgatgcttgccggtggcctgatgctggccctgaccggctgcgccacctacgactacgtcggcggtggccggggcggcggctactaccacggtgcgccgtcggtggagtaccgctatccggccggctatccctacaactatggttacccgtactacggcggctacggcggctattacggcggctatggcaatccgtactactcgcgcccgatctaccggccgccgcacaaccatcggccgccgccgcgcccgcctggcaacggtggcgagaaccgcccgccgccgccgtcgcgtccgtcgtacaacggtggctcgccgtggcggaacatggactcgatgcgtcgcccgccgcagtccagcgtgcagccgtcggcgcccgcgcctcaggcccggccagccccggcgccgagcgcgccgaggatgaacggctccccttggcgcaacatggatcgtgcgacgcagcgcacacttgagcgctga

SEQ ID NO: 535448 - DNA, 963 bp, Stenotrophomonas maltophilia
atgagcgattcactgttgccccgcgccgacgacgtcctgcttgctgccgcgaggatcgccccgcatgccagcgtgaccccggtgctgcgctcgcacacgcttgacgcgatggccggggcgcagctggcgttcaaggccgaacacctgcagcgcggcggcgcattcaagttccgtggtgcctgcaacgcggtgtggtcgctggatgccgatcgcgcccgtgccggcgtggtcacccattcctccggcaatcatggcgccgcgctggccctggccgcgcgcacccgtggcattccctgccacgtggtggtgcccgaaggtgcggtggcggccaagctggccaacattgcccggcacggtgccacgctctggcgctgcccgccgaccatcgccgaccgtgaggccacctgcgccaaggtgcaggccgataccggcgcgaccctggttcatccgtatgcggacccggcggtgatggccggacagggcactgcggcgctggaactgctgcacagcgacggcccgttcgatgtactggtggtgccggtggggggcggtggcctggccagcggtaccgcgctggcgctgcagcatgccagcccgcagacccggctggtgctggccgaaccggccggcgccgatgacaccgcacgctcgctggccgccggcgcgcgccagggcgctttcaccccggacacgatctgcgatggcctgcgcaccctgatcggcgcgcccaacttcgagctgctgcgcgcagcgcgtgcggaggtgatcgtggtcgatgatgcggccacgctggcggcgatgcgcctgctgtgggaggtactcaagcaggtggtcgagccttcctcggccaccgtgctggccgcggtgctggcgcagccgcagcggtttgccgggctgcgcgtgggcctggtgttgtccggcggcaatgtcgacctgccagcgctgcgctgggggacgctttga

SEQ ID NO: 535449 - DNA, 780 bp, Stenotrophomonas maltophilia
atgcatattgaagtgaccggccgtgggccggacctggttctgatccatggctgggccctgcagggcggtgtgttcgcaccgctggtgcagcgcctggcggaccggttcaccctgcatcgggttgatctaccgggccatggccacagtcgcgacgacaccacgccgctgcgcctgccgttcgtggtcaacgccattgccgcggccacgccgccggcggtgtggtgcggctggtcgctgggcgggctgttcgcactgcatgcggcggcgacgctgcccaaggtgcgcgggctggcgatgatcgcagccacgccgcgattcgtgcgtggcgaggattggccgcatgcggtggaaccggcggtgttcgagcagttcgggcgtgagctggccaccgacttcggcggcaccctggaacgcttcctggcattggacgtgatgggctcggcacacgcccgcgaggagctgcgcacgctgcgccagcgcctggtcgaacgcggtgcgcccaccgaacgtgcgctgctggaaggcctgcgcctgctggaaagcaccgacctgcgcggcgcgctgccgaccctgggcaaacccagcctgtggattgccggccagcgcgaccggctggtgtcgccggccgcgatgcaggccgctgcggcgctggccccgcagagtcaagcgttgaccgtcgcccacggcggccatgcaccattcctcggccatgccgacgaggtcgccgccgccctgcaacacttcgttgccggcctgtcaccggccgatggcggacaatga

SEQ ID NO: 535450 - DNA, 489 bp, Stenotrophomonas maltophilia
atgctcggccccggtgtaccggccgcggaattcccggtggatgcctggcgcgaggtgatggcgaccaacctggatgccgccttccatgccgcccgcgcacagctgccggcgctgctggcacgcggcggtggctcgctggtgttcgtcggcaccttcgtaggccataccgtgggcttcccgggcatggcggcctatgcatcgagcaaggccgggctgatcggtctgagccaggtgatcgccgccgaatatggggcccgtggcgtgcgcagcaacgtgctgctgcccggtggcaccgataccgagatgggccgccaggctgcgcccagtggcgacgcgcgtgacttcgtgcgctcgctgcacgcgctcaagcgcctggccgagccggaggagattgccaacgcggcgctgttcctggccagcgatgaaagcagcttcgtgaccggcaccgcgatgcgcgtggagggtggggtgtcgatcacccgcacctga

SEQ ID NO: 535451 - DNA, 360 bp, Stenotrophomonas maltophilia
atgtcaccgattctttccgagagcaacagcaaccgggtcgagatgttggcgaccaggatcgaggttcagtgggatttccgaaacaacgacgggccggtgctgttcaacttcgaccgagtggattgggacccggtcgcgaaccacgtgaacagccgggaatacgaccgcaccatcccggcgcgaatcctgaccttgatcgatcgcgagtacaccatcacccacccggtaactggcgagcaggaggtggtgcctggctggaagctgatggcgctgatcaaggcagcgacggaccgggtctgggaggcggcgacctcgcccgcagcggtggttacagcgccgctggggagcggtggggattga

SEQ ID NO: 535452 - DNA, 225 bp, Stenotrophomonas maltophilia
atgcgcgccaacaactatgaggtgctgaacgagcagggtggcccatcgcagctgatctcgcgcatggggggatcgcacaccttcaccgacaacaccccgggcaccgagcaattcacctaccgcgccatcatcgtcacccgcaacgtggccaccggcacgccgagcggcggcccggtcggtgtggctatcaatcagacgctgggcatcatttccgtggagcaatga

SEQ ID NO: 535453 - DNA, 177 bp, Stenotrophomonas maltophilia
atgagcatccatccttttgccgccgagcttgcggaggccgacatgggcctcttcgcatgcgcagcgctgattgtcatctccctcggcgccgcaatggcatcaatcgtcattgagcaggcatggatggcgatccgtcgcctgtggaagctctggaagggccgcgcaaatggccggtga

SEQ ID NO: 535454 - DNA, 1743 bp, Stenotrophomonas maltophilia
ttgtacgggccggaggaagtggccgcggcgcgcgccatgcgcgagttcggccgagagtcccatgagggtgacgagaccctagcagggtcggaatggattcaggccgaactgctggacctggacgctctcgctcaggccagtctggtcgttgaggcggacttgctgcgtattcctctgtcgattacagacaacctgttgccgctcacgacgcagcaggtcgatgagctgatcggacgcttcggcaacggcagtaagaagcagcagcgcgatttggtggtcgtcctggtcacggccccgccggtgctcagcgacgccgcgtggtcgtgggtcggtcaattcaccacgtcggacgaccccatggatgtccggctcgctttcatggtcttggagggcgcagacgccaagcggctcggtcacgacctggagcgccaaggatggagcttcgttcccgggacggatgccatggcggcgcatgccgccaccggcgcactgatggaggtcaccaagtcgcatgcgttcgatcaggtagccagtcgattggccccgtggcgcctgctggaagcggtgcgagcacgcggcggtgatacctctgaagtgcgggtggctgccgagcacctggacgcgatacttgcgaagggaccgtcggccgtcttcgaggtcggcgcttgcctgaccgtcgagcgcgatgacgacacaaccgctccgccttggctttcggtccgggcaccggcgccaccggatccgcattcacccgaagccttccgaaatatcttcgacagcgacgcccgggtggcagcgcaggagcgggctagtgaacaggcggagaaggccatcaaacaggcccgcaaagaaggcgcgagcctctacctgcagttcgtaacccgtgaggacggtttggcgctgtgccggcatgcgccggaggtggtttgccgctggatcgaagaccacgagagtatcagcaacgatttccggcgtcgcgtgcagcaggccgaaggcttgtttctagccgtgtgcgaaggcttgctggagctggacccgccccgcggcgtcagcctgcgaagcgccctgacccgggccatgttcacccggatcgtggggcgtgccggcgtgccggagttggtgcacatgcttttccgggcacccgagtcaccggccgtcgtcgtggctcgcgacgcgttgctatcgctggaagaagccaacaccgacgccaagctctacgagatcgcgctggtggctcagatcaatggtcaccgggcttggcttgaagatcacatcgcgcgcgacggcgcctcgccgttgccgtggcggcagcagcggggcgcgacgcttgccgggttccggggcgacaaccaattgccaatggctgacgcgtggaccgaagggccgtcgatgtcttgggccgaagacgtggcgcggcgctcggcgcggttgcgccatcacgaagcatgcgcgcggcactggtggcgcgagtactggcggttggaagaccgcgaagaggcgtatgcggcctgggtcctgttctggcaatgcgccgaccgtcgtgcgctgacgtggcaggcatcggaagccgaggtcagcccgaactcggaggccttgaaggccatcaagcgacggcagtggaccgtcaggcagccggactggaagcgcggtgccgagagcacccatctgcacctggagcgtaagttcctgggtcgtgacaccgaagcgcgcgtttggccatggcgattgtctcgacgggactga

SEQ ID NO: 535455 - DNA, 1041 bp, Stenotrophomonas maltophilia
atgcatctgcgccatcagctgggtctgctcgctgaagcggcgcagcatggcggtcatctcggcggtggcagccagcatcttgccggcctcatccttgctggtggcctgggtgctgacgctgaggtcgccacgggcgacggcctggatcgcgtgcacggccttgccgagcgggccggtgacggcgcgcgagatgaccgtggccagcgcggctgcgaccagcgaaagcagcacgatgcagccgatgatggcgatcatgctggtgcggtgggtggcattggcggcggcgatcttgccgtccatcaggccggcgatgtgggtgcccagcgccttcatcgccgcgaacagttcacgacgcgccgggcgcgactgctcgtcggaaatctgctgcgcgagtgggccatcaccggcagccaccgcttcgcgcatcgccttgttggcggcgaagtagcgttccagctgcacgttggcggcctggtacagcgcgcgttccctggccagcgccggcaacgccgcgtacgccgccagttcctcgtgcacggtcctggcggtgtcgtccatgcgcttgttgtagtcggccaccttgtctggctggtcaagcatgctcagcagcgccagctcgtaggtgcggaactcgcccagttgcgagcgggcctcgcccaggtgctggaccgacggaatatcgttgccggccatctcgccaagctgcgtgtttgcctcgctcaggcgcaacagtgcgaaggcgccgaggaccagggtcatcaacgtggtgagggtgaaccccacggccagcttgcgggcgatgggcagatcttggaaccacttcatgcagggtgctccaggtgggcagggtgccggcgcagtcgcggcggctgggggtggttgcagagcgaacgggagtgcccggtggggttcggtgacggccgtcattgcgggataacggcgcggcccgcgcggactttatggacgcagatcacattcggttgcgtagggggtcgggcgcgaaagtgccgccgtgacggggctttcgcttgtgtggcgtag

SEQ ID NO: 535456 - DNA, 507 bp, Stenotrophomonas maltophilia
atggtccgcaccctgaccgtaacggtcgccctgctgctggtgctcctgctggtcgccattgccgcagcacttctctatcgcggcaatgcgctggacgcccaagcccgtgatgccagggcgcagcagcgcgtgaccacgcttcaatcgcaactggaaagcgagcgcagtgctcgcgccaccgagcatacccaggccagggaaatggcccagatcggagaccaacatgaagatgatcgggaggcgtccgcgtccatccctgctgctgttgtggctgacctgcgcgctggcaatctccagctgcgcgacgacctcgccacctgccacaccgcccgcctgtcccaagccgtctctggcgccgtcgaacgtgatgcgagcgcccaactacgtccagaggttgcaggcgttgctcttcaaatcgtcaccgaagctgaagaccacgtccgctcctgccagcgcgtcatcggcgtcctcaccggacagcgcccacccgtcgagaccaacccatga

SEQ ID NO: 535457 - DNA, 318 bp, Stenotrophomonas maltophilia; identical to SEQ ID NO: 504108

SEQ ID NO: 535458 - DNA, 318 bp, Stenotrophomonas maltophilia
gtgatcgcgtactgctgggccaatggccagatcgggttcggcaacaacgtgccggaaggtgcgatcttcatcgccgaagggagcaacgggcagctgcgcaaggtgatcagcgtcgtagccaggcacggaaagggactgatgcaggggatgctggttgtcccgggtgtgccagaggcgcagacgcagcgggcaaagggtgacgcgcttggggattggcttgcgtggtgttcccagcatccgcgtcggctgcgctggggcgcactgcgtgccagcaaccgcaacaccgactcaaaggagaaccgccatgttcatgcgtaa

SEQ ID NO: 535459 - DNA, 1038 bp, Stenotrophomonas maltophilia
atggattatctgaagggattgttgccgcagatcgacagcctgctggcgctgaccgaccagatgctcaatgagcgatcgcatctggatacggcgggcagagccttggcaggttggagctcccaaaatgcggcatcacacttcgcgacgtacgcttttccggcgctcatggagtttcgtgaaggcatcgtcaaggacatagcactgcgctcaatcgagcaatacagtgtcgcaggcgagcaccaatgtgctcgcatgctggaggagtacgcctaccagatggcctgggcgacaccggagcaggaaaaattgttccgcgacacaaccgaaaacgtcttcagatacgcacgcgagctctccgagacagtcgaacgccctccggtcgcgaatgacttctcattctggctgctatggagcaagggcgtgatcgactcacatcgaattccaaaattccgtgtccgtacagatattgtggtgcgaaccaatcaggttcccccgcgcactggcatctacgtcgccaaagacgatcccatggccacactccagtttgcatggaccggtggatacggagagctgtgcccagccgtcaccctcaatgaagttggaagaaccgttctgcggcagttcggtcgagagcgactgtggggcgatgcagaaggcctgtatcgcttcctcgatgcaaaccggcatctggatccctatggatggtcagacattcaggccgatctggtgaaggtggctccgtcagtgatcgccggttcggccttcgatctgaaggattgcgactggtattttgtcgaacccattgccgatgaattcgaggaaatcgacggcagctacaccggcaccgatcagccggatctccgaccggaccgagtcgccgccggagagcgggcgcctgtggccggctggtggtacacccccgcgcaaggtggccggcgcttcttcaagcaaggcgatgtgttccccgccatcaacagcgactggggtgacgccttctggatctgggcgccagaccagacgccgccggcattgggttga

SEQ ID NO: 535460 - DNA, 1242 bp, Stenotrophomonas maltophilia
gtggtcgacctggacgaagcggcgctgcacaaggacgtggccaaggtgctcgaatcagccaccgcgctgctgatctggggcggccggatccgcgtgtggtccactcaccgcggcaagaagaatccgttcaaccagctggtgcaggacgtccaggccggtcgctacggcaagaaggccggggtgatccgcatcagcttcgatgatgccgtgtccaacggcctgtacgagcgggtctgcgccatgcgcggcaaggtggccaccgccgagggcaagaaggagtggtacaccgccatccgctcggcctatggcccgcgcaaggccgcgatgcgcgaggagctggacgtcatcccgcgcgatggcgatggctcggccatcccctcggtctggatcgaccgggccatgcccgaggtccgccccgttctgcgcctggtcttcgatgacgacttccccaagcgctcggaaaaggaacgcgagatctggtgctcggtctggatcgccgccacgctgctgccggtgctgcgtgctgcggtggccgggttcactggccgctgggcgatcggcatggacttcgcgcgccaccgccacttctcggtcatcaagccggccaaggtcgggcaggatctgcgccgcgacgtgccgttcctgatcgagatggccaacgcgcccacccgccagcaggagcagatcctgtgggcgctgctggacgcgctgaaggaaggattccctgggcgctggtcgttcgctggcgatgccaccgggccaggccagaccctgatggagtacaccggtgaccgctacggccgggccgagctcgatgccgagacgggccgctacagcggtggcccaatccacgaggtcaccctgtcgcgcccctggtacagcgaatggatgcccaagtacatcgcgttgttcgaggacggattcatcaccgtgcccagggacgcatcgctggaggatgaccatcgggccgtggagtacgttgatggcattccgatggtgccgcgcctggagcgcaaggacctgcaggatccggaactggtgcgccacggcgacggcgcgatcgcaggcgccctgatgcagtttgccgcgctcaaccacgtcacctcggtacccatcgagttccaggcggccggcgctcgcgcctacatcggcgacggccgagccgacggcgtggccaccgtcgtgaccgatgatgccttcggcacggtcagcggcggcaatgattttggaggattcgcatga

SEQ ID NO: 535461 - DNA, 990 bp, Stenotrophomonas maltophilia
gtggccaccgccgagggcaagaaggagtggtacaccgccatccgctcggcctacggcccgcgcaaggccgccatgcgcgaggagctggacgtcatcccgcgcgatggcgatggctcagccatcccttcggtctggatcgatcgggccatgcccgaggtccggcccgtgctgcgcctggtcttcgatgatgacttccccaagcgctctgagaaggagcgcgagatctggtgctcggtctggattgctaccacgttgctgccggtgctccgtgctgcggtagccgggttctccgggcgctgggcgatcggcatggacttcgcgcgccaccgtcacttctcggtcatcaagcctgccaaggtcgggcaggatctgcgccgcgacgtgccattcctgatcgagatggccaacgcgcccactcgccagcaggagcagattctgtgggcgctgctggacgcgctgaaggaagggttctctggccgctggtcattcgccggcgatgccactggccccggccagaccttgatggagtacaccggcgaccgctacggccgggctgagctcgatgccgacacgggccgctacatcggtggcccaatccacgaggtcaccctgtcgcgcccctggtacggcgaatggatgcccaagtacatcgcgctgttcgaagacggtttcctcagcctgcccagggacgcgtccctggaagacgaccaccgcgcggtggagtacgtcgatggtatcccgatggtgccgcgtctggaacggaaggacctgcaggatccggagctggtccgtcacggcgacggcgcgatcgccggcgtcctgatgcagtttgccgcgctcaaccacgtcacctcggtgcccatcgagtttcaggcagctggcgcccgcgcctacatcggcgacggccgggccgacggcgtggccaccgtcgtgaccgatgatgccttcggcaccgtcagcggcggcaatgattttggaggattcgtatga

SEQ ID NO: 535462 - DNA, 318 bp, Stenotrophomonas maltophilia
gtgatcgcgtactgctgggccaatggccagatcggcttcgggacaaacgtgccggatggcgccattttcattgccgaagggagcagcgcgcagctgcgcaaggtgatcagcgtcgcagccaggcacggaaagggagtgatgcaggggatgctgcttgtaccgggtgtgccagaggcacagacgcagcgggcaaagggtgacgcgcttggggcttggcttgcgtggtgttcccagcacccgcgtcggctgcgctggggcgcactgcgcgccagcaacctcaacaccgacccaaaggagaaccgccatgttcatgcgtaa

SEQ ID NO: 535463 - DNA, 519 bp, Stenotrophomonas maltophilia
atgccgaagatccgagacacctgcaccttccgcttcgacggcgttcgcggtgcactgaatgccagcaccttggccctggcggtggagatcgccgaccgagcagcacgggccgacgtggagatccacgcgcccgccgtgaagctggacgggctgcgcttcttcgataccacctgcggcaacatccagggcgaagacgcgaccgccgcccgctatgccatccgtcaggcagtgcggtacatcgaggcgcgcggagacgcactgccctggcgcctgaagcgtcacatctcccagtcggcgctgctgcacttcgaagatcgcaccgaccccgaggtggccaccaccgggccgcgtcatgcctgcgtcaactgcgacatgcccaccggtgcgcccgagtcgcccatgtgcggcccctgcgctcagcaggcggtgggcgcgatggccgccgcgctggctgtcgccaaccaacgtttggatctgatccacgaggttcagaaatccatctgcgaggtgcaattgtga

SEQ ID NO: 535464 - DNA, 351 bp, Stenotrophomonas maltophilia
atgaagctggtggccgagcaggcgccggacaatgccgccgagcgcggcagcgccctgatgggcctgctgcagaccgacctgttcgaagcactgctgcaattccaggaggcagccgaccaggacgacgagagcatttcccctgctgatcgcattgcgctgtacagcaaggcggccaaggccattgccgagctgacccgatcttccatcgtgcgagagaaatgggccggcgaaatccgccagaaggcgctggtcgacgcggccagccgggtcgaggaggctgcacgggcaaagggcctggacgctgagggcgtggagttctggcgcaacaaggtgctgcatggagtcggctaa

SEQ ID NO: 535465 - DNA, 315 bp, Stenotrophomonas maltophilia
atgatgatgccgctgtcggtctggatcgcgcgggtggcctgcagcagcttggccttctccggatcggttgcgttggtgtcgtacttgcccaccgcggtgggcatgccgaacttctcaaggaagatcagccagaacttgagcccgttgcgcttgaacagcaccggccagtacagccagtgcgccaagccgaggccgtacggctcatcgtcgtggtcggcaccggagcagaagttccagaagtatggtgcgagtgccgggacgccctccgtcatctgcgtctgggtgagcaggcgcagatcgccttccttgccgtag

SEQ ID NO: 535466 - DNA, 294 bp, Stenotrophomonas maltophilia
atgagcgagcagagcatcttcgcccgcctgctgttcggcctcgctgggcatagccgctccggcctgcgcctgaagcaaatcgccgatggcatcggcgaatcacccagcaccacgctgcgcaacctgcagcgactggccgaggacggcctggtcgagcgctccccctatgaccaggacaactggcgtctgtccccccgaattgtccagatcgccttggcacatctcgacgaggtgctccgcgaagagcggcagctggacgacttcaagaaccgctacagccgtagccccaactga

SEQ ID NO: 535467 - DNA, 561 bp, Stenotrophomonas maltophilia
gtgcccgaggcacagatcaagccgatcgatctggcccgcgaccagctggtgcaggagaagatccagcgcgccctggagctgcgcgaagcactgcgcaccttcaaggcggatacgttcgccgatatcggcgcgttcgtgcagctcagcggcgagcagtacggcgccaagatcggcggcgacaagggcaacgtcagcctgtattcctacgatggccgcttcaagatcctgcgcgcctgccaggacaccatccagttcgatgagcgcctgcaggccgccaaggcactgatcgatgagtgcctcaacgactggaccgaaggctcgcgcgccgagctgcgcaccctggtcaacagcgccttcaaggtgggccaggacggcagcatcaagactgcagaggtgctgtcacttcgccggctgcagttcgatgacgcccgctggcagcgggcaatgaccgcgatcagtgatgcggtgacggtggtgggcagcaagacctacgtgcggttctacgagcgcgacgcacgtggccagtaccagccgatttctctcgacgtggcgggggtctga

SEQ ID NO: 535468 - DNA, 408 bp, Stenotrophomonas maltophilia
atggaccagacctatggggacaactacgagcctgtccaggcgctgccggagccacctgcggtaccgacagcgatcgatgggccgcagttcgctgatgccggcggtacggtgggtagcttgctgcgccggcactatccggcggcctttgccgacagcaccccgaaggcgcctgatcctgccatcggcctgggccagcaacttgatcggcgactgtcgtctctcggtgctggttgggtggagcagatccgccagctggtcgacgaggtcgattcgctggaggaactgcgcgaccggctgttcgagctacatccgaacatgaccttggacgactacgcctcggtgatggccgatgcgatgacggccgcgacgctggctggccgtaccgacatccagggcgcgggagactga

SEQ ID NO: 535469 - DNA, 441 bp, Stenotrophomonas maltophilia
atgtttactcgagtatgcaagcgagtaccactgaccacgctatggcttgttcttttcgctgcgtcacccttgtcgggcagcaccgccaaagcctcagaacaccacgtggactactcaaaggtcacgaaggctgatgtcgcgattgtccaggagcgcgctgtcaggtatgtcgtaatcgctgacaatccatgtctgacagtccagtccttcagactcggccatccaggcgagtatcaccgcgagaagttcatctgctccgtcggtggcgcgcgctttgatcgcgacttcgccttggtcgacttcaaggcgctcgatttccacgatgaccgtctggatgtagaagtcgaattcattccctcacgaaggggacgtaaggcggtcaggtggtgctccatcgccctgcagcctgattccattggcgatctggtgtgcaatcgatga

SEQ ID NO: 535470 - DNA, 336 bp, Stenotrophomonas maltophilia
gtggcactgaaactgacagagccgtcatacaggttgaccttctcgccgaagatgtcccccttcagcggctcgaccagatcgccgtatttcagccgcttgtcgtattcctggcgccaggtgggaacgatctgggcagaggccagtgccggcgccagcgacagggccgtcaccatcagcagcagcgaagacctgatcgggccggcatggcgcgagcggagcgtgatgcggaaccgcatggggatcctccttggatcgtccgtccttgaaagcgcgcacagacagcaggacctgtcccctggccagcgcgatctacacccatttatgaatcaaacatga

SEQ ID NO: 535471 - DNA, 1164 bp, Stenotrophomonas maltophilia
atgctccccaagttcggtcgccccgtacttgagattccgccccgcctcacgcgggaacggtgcattggcgatctgcgcgtccgggtagtagttgttgcgctccgtgcggaccacagtgccgccagcgctggtactggtcgacagcagcagaccgtcgttgtaacccacttccttgccgaattcgtatgtccggatgaccccatcgggcagggtttcaatcgttatcttcggttccgcctgcccgaccgggatcgctggccagcccgcctggtcaacccgcctgtcgtactcccaagccaggttggtgtactgatagctccattgcgccgtgggcatcgccggaccgctgatccgctttgccaccagcgacatcgcgtcgcggtagatgggcgtgaggttccacccatcggccagcagctggtcgtcgccggacgtctggcaattgaatggcacgttcttgcgcccatggcggaaaggtcggaacacgaaggttccgacggccccagagggatgggtgatggacgccgccacttcggtctgcacgatcttgttcgtcttcgcgcacaacgccggcgcttccatgtaggcccatacgtcctgcccggcatattcctggtacttcttcgtcacattgaccggaggcaggtcatagttccaggcagtgccatcgggcagcgtgaccgattgcagcgttcccgccggcgtgtagccgtaagtccaggtacggcccgccgccagggccgttgcgatgcgcccctgcgagtcataggtcaggctgatgctgcgcccgtcgctggcgatgatgcgatccaggcgcccgccgctccactcatagcggacccagttgccgaatcgatcgacgacctgcgacggatagaggaagaccttcttccgctgcagcgtcgaatgggtgatggtgtcgtagggctgcatgacagccgggtcgttgtggcgcgccaccatccagtcgaagtagtacttggttccgtccggcgcatgtcccaggaagccttcgcccggctggccgctcttcagggaactgaggcaggagaagaaccatccgcccttggtattccacggggcgggcatgccaagttgcggggtgggctggcgcgcatctccgctgccggcgagaaccgtttcaccgctgccgccaggcagtga

SEQ ID NO: 535472 - DNA, 312 bp, Stenotrophomonas maltophilia
atgagccaagaagcaaacgcaagccttcgcaggcagaagagggcgcagcgggatgccaagcgtcagtgcaaagcagcatggttccggctggacttgcctacagatgaggtgttgcttctggcccatattggttccacctcggccattgcgaagatgaggctcaagtcggccgttcggaatgaccggtgggattgtggtgatgggaagtgggtgaaggtatctgaaggtatgtacttctcttggccgatggatgagccagagcctgtattcgttggatgcaagccccactaccgctgggagcgccgccgatga

SEQ ID NO: 535473 - DNA, 636 bp, Stenotrophomonas maltophilia
atgcgggggcggtgcgggcgtttattgaagcgtcggggtggttgcggcagcggtagcgctgggctgggctgtgcctggcggacagtgccaaccaaggttggcacccaccagagtcagacctccccggccgcgacgggccatgccccgcgcacagtgccaaccaaggttggcacccaccagagtcagacctccccggccgcgacgggccatgccccgcgcacagtgccaaccaaggttggcacccaccagagtcagacctccccggccgcgacgggccatgccccgcgcacagtgccaaccaaggttggcacccaccagagtcagacctccccggccgcgccgggccatgccccgcgcacagtgccaaccaaggttggcacccaccagagtcagacctcccctgcagcgccgggccatgcccgacgcacagtgccaaccaaggttggcacccaccattgggggcatcgcccccatcatctcaggcgtacagcgtcgggtcggccacgccggcttcggcgaagccctgcgcgcgcaggctgcaggcgtcacagtggccgcaggcggcgccgttggcgtcggcgttgtagcaggacacggtcaggccgaagtccacgcccaggcgcacgccttcgctga

SEQ ID NO: 535474 - DNA, 324 bp, Stenotrophomonas maltophilia
atggctggcaatgcagcagcagaagtgaaggcactgagtcgggccaactgcattggattcatcaatgaatccgttacctacgaacgccctcagttccgcaatttccagggatcggccgctaccacgcacatcccgcttggaaacatcgaaccgaagcatgtccttggagctccgaacaacgggctgtactcctggcgcttctacgcaggcgatggcaccgatccggaacgaatggttgttcacggctatcacacatgggtgctaggtgggcgcgtatttacgcagtccacgagcgcggtcgattgccaactttcggagtggtga

SEQ ID NO: 535475 - DNA, 1788 bp, Stenotrophomonas maltophilia
atgactgcacccaccgccccgcgctggcccgtacgctacctgctcttcatcggcggcctcggcggcctgctgtacggcatcgatatcggcatcatcgccggcgccctgccctatcttgaagcgaccgccagccacgcctggcagctcagcagccagcagctcggtttcgtcgtggcggcggtactgctcggcagtgtgctgtcttcgctgtttgccggcatggtggccgacctgatcggccgccgcggcgcgatgctgctggcgggcctgctgttcaccgcgtcgattccgatcatggcgctggcctcgggctacacgccgttgctgctcggccgcctgttgcagggcatcagcggtggcctgatcggtgtggtgattccgctgtacctggccgaagtgctcagccccgaacgacgcgggcgcggtgcggccatgttccagctgctgctgaccatcggcctggtgctggcggcgctgatcggcctgtaccacgcacatgcagtcgacgccgccgctgaagccgtgcgctcactgccggtcgcgcaacaggcgcaggaactgttcacggtgaaggaccacgcctggcgcaccatcttctggacctgcctggcgccgggcctgctgttctgcgccggcatcttctggctgtccgagtcgccgcgctggctggtgcgccgcggtcgcatcgatgatgcgcgccgcagcctgcagcgggtactgcccgcttcggaggtggagccgacgcttgcacagatccaggcaccggaatcgagcagcagcagcggcaagcgcgacccgctgctcagccgccgctatgtggtcccgttcctgctcgcctgcgtggtgctggcctgtacccaggccaccggcatcaactcggtgctggcctatgcggtgaacatcctcaaccaggccggcctgtccggctcggtggccaacagcgccgacgtggcgatcaagctgctcaatgcggtgatgaccgtggtcgcgctgctgctggtcgatcgcaagggccgcaagttcctgctgatgctcggcagtggcggtatctgcgtggccctgctggccgccgcgaccctgttcttccaggccgagcgtggccgcgcagacgtgcaatcgcagctgcaggccgcggtcagcggcgatggcctgcagctggtgctggatgaagcgcagtggcagcgtctgggcgcgggcatcgacagcgaaggccggccgctgcagctgaccgtgtcgtacgcctacagcgatttcaccaatgtgcgcgccctgcgcagcgacaacctgaccgatcgcgaactgcgcatcgagcgtgccggcaccgtgcagccggacagcgtgatcggcgcgttcttccgcaaactgcatctgaacccgttcgccgacccggccaaggccgcgcaggcaccgttgcgcatcgagcaggcccgcatcggcccggtgccgccgccggcacacggctgggcggtggccgcctgcatcctggtattcgtcgcgttcttcgcggtcggccccggcgtctgcgtgtggctggcgctgtccgaactgatgcccaaccgcatccgttccaacggcatgagcatcgcgctgctgatcaaccagttcgtgtccaccaccatcgccgcgatcttcctgcccacggtgggccactacggctacgccagcatgttcgtgttctgggcggcgtgcaccttcgtgttcttcctggtggccgcgctatggctgcccgagaccaagggcaagtcgctggaggagatcgaagcacggtttgccggcaagcggggctga

SEQ ID NO: 535476 - DNA, 714 bp, Stenotrophomonas maltophilia; identical to SEQ ID NO: 535428

SEQ ID NO: 535477 - DNA, 1404 bp, Stenotrophomonas maltophilia
atggtcatgctcgagcgcggtgatcaggccgccgggcatgccgggcacgtccgagacctgcacgcggtcgccgtcgatgcgtaccacgcccttctgcgtgccggcccagaccacgccctgcggatcaacgctgatcgcgcggatgttgccgcccggcatgccatcggcggccgcgtagttgtggcgcagctggccgtcgcggccgagccggtagacaccatcgccgaatgttcccacccacaggtcaccatcgggcccctgcgccaggctcagcaccgacggtgccttgccgccgcggttgtgcagcggcatcgcccggaaacggccatcggcggtctgcaggtcaagcccgctggcactgccgacccacagctggcggtcgcggtcctccaacaccgtgcgcacgtagtcgccactgagcccgtcgcgctcggtgtagctgctgaacagtgtctcgcgcaggcggtacaggccgccattggcacccacccagatgctgccttcggcatcctcgcgcaggctgaccacgcgtccgcccggcaggttcaggccggccggcagccgctccaggccgtgcccggagatgcgcagcagcccctggttctcggtgcccagccacaggtcgccgtgccggtcctgcagcatcgaggtcatgtgcagctggccgggcaggcggtgcaccagcaccagccgatcgtcctccacccggtacaggcgctcaccggcgacgatccacaacgcgccgtccggcgcgcggtacggccacgacaggccagtgccggcgcccagcccccacgccgcaggcgcccgcttgagtacaccgtcgttgtcgcgcagcaccagcccgtcgagcgtgccgacccagacccggtcctgcgcatcaaccaccagcctggtgaagctcatcgccatcggcaggtcggccgccggcgcccggtagacgatgcccgagtccggcgtcagatagccgatgcccttgccttcgtacaacagccacagccggccctggctgtccatctgcatggactggatcagcacctgcggcgtatccgcctggtgctcccagacccgccactggccatcactgccgcggtggctgacattgccgcgcgagtcgctgatccacagcccgccctggcggtcgacgaacagcgcgccgatgccgttgtcgcgcaggcccgggcgcgtgctgcggtcgaacacggtgaaatccaggccgttgtagcgcaccagcccttcccaggtggcgaaccacagatggccctccggcgtctgtgcgatgtcgcgcagcgagttgtgcggcaggccattgcgcgaggtccatacgtcgatggcgtagtcgcgcagcggcggtgcgccctcctgcgcagccagtggcagcgccagggccagcagcagccatag

SEQ ID NO: 535478 - DNA, 1419 bp, Stenotrophomonas maltophilia
atgaatgacaggatagaggaaagaaatctttctttagctttcgggccggaatcatctggcgacagcccagaagaacgcgccaaaacatcaaaacttcgcttcgttcggggccagttgcagttagcgcgttacagcggcaatgctactggccgggtgctcgaagcgacagaagcgcttgaactctttggctggtctgcgctcctgaaggttggagaagatggctcgatgccattgatttcctctgcgcaagaacccgcccacacgttaaagaggcgaagggaggagcttggcctttcttatgaaaaccttaagcgcaaaaccaaggttccagtaaatacgattaaggctgctgagaccccaggggctcgcactccaatacgcatactagagaagcttgcgcaagcgatggccttagacgaacaagtcttgggaatggtccccgacgcgggtcgcgacgcgagtcttggtgttagattgagggaaatgggagatagcaactcaaaccaaggatttacggcacataccgtccttcagtttgcagaggccgcatggatagtagatcgacaggtgtctattcaaaaaaggctgtcagaaattgctccaagttgcttgacaagcctgccttacccagacccggactattcttacccaacctataagcaaggctataggcttgcgcgcaaaacccgtcagctgttagacctcgatgacgaagagcccgtcgaaagtgtccgcaaagttattgaagatcaattcgggctgccgttagttcaagagtctatgacccggaagctggccggagcaacgcttgcaaatggtgcaattcggggaataatggttaatgaggcaggctccaacacgaatgtgtgggtccgccgaatgaccctttgccatgaacttggtcacttactctgggatcccgatgacaagcttaagaaagtcactgtggatacttatgcggacttggagcagagcgatagagagcaggacagagatattgcagagatccgcgcaaatgcatttgcagtcgcctttcttgcgccggcactagccgttgaacgcatttatgagagatgcaacgacccaaccagtgtggtctcagctgtaatgagcaaattcggcatcagcgccaccgccgctaagcaccacgtccgcaatgtgacggggcttaatacggcgagcgttcgaaattccgatctcccaacacctgagccccatttgattgcaatggagaatcttacgctagattatttccccgttaagtcagttccatcttcaaggagggggaaattcgcatggaatgtcgccaaagctcagcaactcggcctgattagccttgatagtgcggaatcttacttaggttgcgatgccaactcactaactgaagatgcgcttcggataatcttggaactgcgttaa

SEQ ID NO: 535479 - DNA, 1119 bp, Stenotrophomonas maltophilia
atgtccagacccaggcgcgtggcattgctggagatgctgccctcgctgttgtcgagctggccaatcgtccaggtcgtctcggcgctgccaccgtgggcaaggctgccgccgcgattgatcgccgacatcgccttcaactcgaagccacgggcgaaggtcatgcggccgccgctgttgtccagctgttgcacctgcgcgctggccgcgccctggacctgcagggtgccacgcatgttgcgcagcgcctgtccctgcacctgcagggtgcttgcgcccagggtgccgtcgctgttgtccaggctgttgcgggcgctgagctgcaggtcgccactggcttcaatgcggccgccgtcgttgctcagggttccggcgatgttgagcaggccggttgccagcggcgggagcgacgtgaccggcggggtgccggtgccaggagagccggtgcccggggtccccgtgcctggcgtgccggtacccgggttgcccgtacccggtgtcccggttgccggtgtacccgtgcctggcagggtaccggtgccggtacccggcgacgcactggccacgttgccgatgcggccctgcagattgctgacgtcggccgcctgcagctgcagcacctgcgcgccaagctgttcgatgctgccgccgcggttgcgcagcgcatcggcattcacttcgatgcgtcgcgcattgagcgtgccgccactattgtccatatctgccggggtctgcacgcgcagctcgcgctcggcactgagcgtgccggcattggcgatgcccgcgctggcatcgatgcgcaggtcctgttgcgcatgcatcgcgccggtgttctgcagccggccgtcggcagtgacgaccagctcgccggcctgcgcgccgatcttgccggcgttgctcacgcccacgccgtgttcgttgccgaccagccagatgcgattggcgtacatgccgcccagcgcgcccacatccagcgcgaaggtgggcgccgcggatgcaggactctgcagctgcacgctgctgtggtcagcgctgaccacgttgctgcccaggctggcctgcagctggttggcccagatgccggcgttgacctgcagcgaacgggtgatgatgtcggtgtag

SEQ ID NO: 535480 - DNA, 2769 bp, Stenotrophomonas maltophilia
atgctcagctggctggccgctgtacccgcggactgcagcgtaccgccggcgttgaccagcacggcgctgcgcagatccaggccgccgttgctggacaccgtaccgccgctgttgtcgatgcgttcgcgtgcgctcagccgcagcatgtcactgccggtcgcggtcagcgtgccgccggcggtgaccagggtgccggtgtccacctcgatccgcttggcggaggtgacacccgcccgcaggtcggtggtggtgcccttgagcagcaggctgccattgctgaccagcgtgccgcccgtaccgttgagcgctccggcgctgatcgacagcacgccttcgccggcgtgctgcacgccaccgccggcattgtcgaacaccgccgcctggatgcccaggtcgccattgctggccagcaggccaccctcgccgttgtccagcgtgccggccacctcgatccggctgccctcggcaccggttgcgatgaccttgccggcccggttgtcgaacgactgtgcgtccagcgcgatgcgctcggcctgcagggtggcgccgcgatggtccacgctgcccgcctgcagggtgatgccccctgcgctggcaatggtgccgccctggccatccagttgcccggtacgcagcagcaggccctgcgtgccggcatggctgagcgtgcccttgacgttggccatgctgccggcgtcgatcttcagcgccgcaccattgctggccagcgtgccgttgctgttgtcgaacaggccattgacgcgcagctcagtggacgcgctgccggccgaactgagcgtgccgccacggttggagagctcaccggcttcaatgtgctgcgcaccgttgctggcgatggtgcccgcgtcgttggccagccggccgcttacttgcaatgccagcgttccgctgccggttgcacgcagcgcgcctgcactgttgtccaggccgtcggccacgatatcgagctgctcggccgccacgctgccgccgcggagatccaatgaaccgccctgcagagacagcgcgcgggcagcaccgatgctgccgccctggcccgacagcatctgcgcgtcgatgcgcaggttgccgttggcggagatcgagccgctgcggttctccagctgcgcggcacggattgcggatgcagcgtcaccggcggcgatgaacttgccgtggtcgttgacgaagcggcctgcgtgcacgtcgacggcgccattgctgcccagcgttccgccggtattgtcgagcaggctgcgggcctgcaactggagcacctggctgccgagcgcgctcagattgccgcccgcggtgatcacgctgtcaccggcgatgctgatgcgttgcgccgtcgtggtgccatcgcgcagatcgagggtatcgccctgcaggtccagcgaaccgttgctgagcagggtgccaccggcgccggtcaggtcctgcgtggtgatgaccaggctgccggaaccggcctgctgcacggttcctccggcgttgccgaaggtgcgcgcgtggatgtccaggttgccattgctggcaacggtgcctccattgccattgtccagcgtgccctgcacgcgcagcgtgttgccgccggtgccggtggcgatgatgcgcccaccgcggttgtccaacccggccgccgtgatatccagctgtgcggcagccagcgatgcgtcctggtggtcgacctcggccgcagtgagctgcagggcgccagcagtggcaatctgtcccttcgccccgtccaggcgcccggtatcgatgaccaggccggcgctgcccgcatggctgagggtaccgccggcattgaccagcgcgccgctcttcagctgcagattggccgcgttgctggcgatgctgccgccactgttatcgagcgtgccgtcgacccggatctgcgacgctgcagtacccgccgaagtgagcgcaccgccgcggttggacagcgcgcccgcctggatctgctgcgcgccattggcgctgatgctgccgccgtcgttgcgcagcaggccctgcacctgcaactgcatcgcgttgttgcccagggacaacaggctgccgccgctggtgtccaggcccgtggccgtgatcgtcacgtcacgggcgcgggtgttgcccttctgcaggtccagctgctgcccgctcaactgcagctggccgttgctggcgatgctgccgccagccccctgcacggtgatcgcctcgatctgcagcgtgccggtgccggcatggtcgatgctgccgccctcgttcagcagcccatcggccttgatgtccagatcgccattgccggacagcaggccgcgctggttctgcaaccgctggctagcatggatgcggctggtgccagtgcctgcggcgatcagtttgccgccatcgttgatgaggatgccactgttgatgtccagcgcaccattggcgccaacggtgccgccgctgttgtccagggtgcgcgatacctgcagctgcagcgcgtcgccgcccgtcgaggtcagcgtgccaccggcggtggtcaggtcgccggcacgtgcatcgatgcgctgcgcggcggtggtgccgttgcgcaggttcagggtattgccgtgcagctgcagggtgccgttgctgagaacagtgccgccctggccctgcaggttggcggtggcaatgcgcaggttgccggcgcccgcctgctccacggtgccggcagcattgccgaaggacgccgcgtcgatctgcaggtcggcgttgctggccagcaggccaccgtcgctgttgtccaggtga

SEQ ID NO: 535481 - DNA, 732 bp, Stenotrophomonas maltophilia
atggactgtgcctcggccagcagcgtgcctccggcggacagggtgcccttgtcgctgttctcgagcaggctgtcgacgcgcacggtcaacgcgctggtgccatcgctgtgcacggtgccgccgcgattgtcgaacgcacctgctgtgagggtggcgtctcctgtggtcaggatgcggcctccgcgattctccagcgcacgggtgatcgccagggtgctgccaccgccgccggcagcctggatcgtgccccggttgttgagcagctgcgcgctgcgcagatccagcgtgccattgccggcaagcgtgccaccggtgttgtccagcctttcgcgcgcggacaccttcaaggcatcgcgaccggaggcgatgatcgaaccgcccgcgttgagcagcgtgccggtatccacggcgatgcgggcagccgacagcgtgccgtcactcaggtcggtggtctcgccggtcaactgcagggcgccattgctgagcagcttgccgccctggccattcaaggtgtgcgcgttgatggccagcgtgccggtgccggcctgctgcacggtgccgccagcattgccgaacactgcgctggtcagggccaagtcgccattgctggcgatcagaccgttgccgccattgtccagtgaggtggtggcctgcacactgctggcctgcgtgcccgtcgccagcagcttgccgttctggttgtcgaagcggtcggcaatgatgttgaagtga

SEQ ID NO: 535482 - DNA, 1071 bp, Stenotrophomonas maltophilia
atgctgctgatctcgccggtggacgcattggtgatgttgcccgcattgatgttgacgttggcgccggccagcttgccggtgttgtccaggttgccctggatggacaggctcagcgtgccgttggccaccatctcgccacggttggtgtggctctgtcccagctccagggtcatgtcaccctgcgacatcagccggccgtcaccgatgatctcgcgggtgcggagggtctgctgcctgccggccaccagggtgccgccgctgttgaccagggtatcggcgcggacatcggagcccagggccgccgacaccaggccaccgctgttgtccaggcgctggttcacctgcagcacgaggttgtccgcaatcacctggccgttctggttgtccaggttgctggtggttacctgcagggtcttgccctgcagccccagtgcaggaccattgcccgggctgagcgtattgcggttgtcgacgtggctggcctgcaggtcgaggcggccggttgcggccaccaggccgccactgttgagcagcgcgccctgcaagccgatatcggcgttgccagcggcggtcacgctgccaccactgttggccagctgctgcgcgcgcagcagcaggtcggccgcactcaccagcgagccaccgccactgttgtcgatgttgatggcctgcacgtcggcgccggacttggcggacacggcgccgccacggttgtcgagatcgccgctgcggatctgcagcgtgccgctgctgacgatgccgttgccattggaactggcattggtcagccgctgtccccaagtgttgatgctgagcgccgccgccgattgcaacaacccgccggtattgtccagcgcaccactgcgcagctccgcatttccggaaaggctggcaatgatgccgctgcggttgtccagcgcctggccgcgggtatccagctgcaggtcgttggcgatgatccggccactggtgttgttcaggccgctggccgagacctgcaggtgcttgccggcctggaccaggccagcctggttgcgcagcacttcaccgctggtcagctgcatgtcctga

SEQ ID NO: 535483 - DNA, 861 bp, Stenotrophomonas maltophilia
atggccgccgttggccccctgcgccgcgccagcggcgcccggcccctgcgcgtccacgctgcccgcaccctgccccgtgctctggccgggcccctgcacgctgcccgcgccgggaccgaccgcacctgcaccgcggccgttggtatccacctgcgcggtgcccttgccaccaccggcgttggggttgctgcccccggtgttgtcgttgcgcaggttgccgacatcgatggtgagcttgccaccggcggttatcgacgaacccaacgcaccggtcttctcggtgatcggtgccgccttccagcggctggaggagccaccgtaggtgatggacacgttgtcgaaggtgctggtgcgggtcagctgctcggcagcattgatcacctcggattgatcgcgattcaggccgacgatggccaggtcgcgacccgcagcgatgttggcgaaacggttctccagccgatcggtgctgatccgcatgttgccgcccgcattgatcacggcgttgttgcctgccgagaccaccacgtcttccacggtggtgcgggtggcaatgcgggtcttctcgttgccgctggtctcctgcgggtgacgctgcatgttgatcagcgtcgcatccggattgtcatagtccggataagtgatgagctgcacgcaggtggtggtgcaggtgccgtaggcgttgttgtaccggagggtatcggtcacgtactcgatcggcggcgaaccggccccgcggacggagaggtcgcggaagggatcttccgcgcccgcgccgagctggtcgggattgttgcggttgtcggcacggccgacgtaatagatcgtgacggtgccgtcctgcacgttgaggcgttcgcgtga

SEQ ID NO: 535484 - DNA, 861 bp, Stenotrophomonas maltophilia
atgcgctacggacttatcgacggcaacaccttctatgtctcatgcgagcgggtcttcgaccccaagctgcgaggcaagcccactgttgtgcttggcaatggcgatggatgctgtatcgccctgtcgccagaggccaaggccttgggattgaagatgggtatgcccatcttccaggtccccaaggacatcagaaaacaggtcctcgtcaggtcagccaacttcgccctgtacggggatctgtcagccaggattgtgacgatcctgcaggatctcttccccagggtggagatctattcaatcgatgaaaatttcgtcgacctggaaggcctcaaagaccctgttgcggcctgcattgaggcacgcgaacgtatcctgcaatgggtgggcattccctgctgcgctggcctgggtgccacacgcaccctggccaaggcaggcaacaagctcgccaaggaccagtccaagcgtgccgtccatgcgggctccttggccgtcttccatgccaccgcacagaacgtcaacgctctggccgtcgaggatgtgtggggagtgggcaggcgctacgccgaacgcctggcagccgaaggggtaagaactgctgcagatttggccgcactccccaccgaccatgttcgtgcgcactatggggtagttctggcccgcacccaaatggagctgcggggaattccctgcagcgatctggaactagaagaacccgaacgccagcaactggtggtcagccgtacttttggtcgtgacgtgaccgacccgatggaggccctggccacgttctgcagcgtggcctgcgagaagttacgcaagcgaggccaagcggcaggtggaccggccagcctttcgtag

SEQ ID NO: 535485 - DNA, 192 bp, Stenotrophomonas maltophilia
atgtcacacatggtcatttcagagcactgcgctgcgctttccgctcgggcgcgcatcgaagccgaagcgagcagccgcatgggctggacggcatccgccgaggattgggagcgcatcgccgatcagtggcaagccctttctcaggaggcttacgcgctcgccctcgccaatggtgaaggtggcccactgtga

SEQ ID NO: 535486 - DNA, 882 bp, Stenotrophomonas maltophilia
atggcttcgcgcacgttccgttggatggtcgcaggcagcaccgtcgtgttgtttggcggcggctacttcatctacagcctgatggccgcacaggggcagggcacgctggcccaagcgccgctcaacatcgaggtacagacgcctcctgcattcgtaatggcgctggacgattccggctcaatggtgtgggaaacgctgaacaatacccgcgatggtgtctatcactggattgacgggcggggcttctacaacggcagcacgccgtacgggtacgatcagccgaaaaatgccaccagccttcgctactactacttgactccgccctatgggcggggaaactccgcaattccaccattggatgccttcgggttcgcccgctcgccggacatcaacggcgcatacttcgacccacgcgatgactatcctgcgtggaaaaccggctcgagcgacccggctaagatggactacatgaccatcgatccgacggcggcccccgtcgatccgcggccaagcggcagcagcggaactacctcgcttgtgcgtaatctgaccacgaccgagacgcgactgcagaatgactggaagttctcgctgcgcagtggcatggtgctacccaaagggacggtgatccagaggtacaatttcgtatgcaccaccaacccgtcgatcgatgatcgaaacaccacggtcgacggtagttggcggagactggatcgcgatttcaccgtcacccgtgagtgcgacgcgtccttccagtacttcgcgcccactttcttcctggtcgacaagcgcacattgcctgctgcctacggctacaccgccgatccggttgcggtgaccgatccggtggggggggcgaccgggcacgttgtacaagtatga

SEQ ID NO: 535487 - DNA, 876 bp, Stenotrophomonas maltophilia
ttgaccaatgcacttcttcaggcccagattcttggtcatcatctcggccaggccaagctgaatgagtgggtccagtgggaactgacgggctaccctaaaggcactgaggtgccggcataccgactgatcccgcttaacccgtgggcccgcctctctgacggttgggtgacctatcccgatcaaaagcttccgacctcacacctccaaggcgaggtccgtgagcgcatcctgaacgggcgaatcagtttcggcgtcgccgctatcgaaagatgtgccgaaacgaatgctgtggcgcactaccctcccgactttgcggactactttgcggatgttttgggcggcgatttctccatagagagcctgtggggcaagccagcggcaggcgcctatgctcaaatcttggttgaggttcgctctagacttttgaactatgtgctggaagccaacatgactctgccgaaagatgatgacaaggccgaacttggggctgcctcaatgaagaacacgctggactcgctccttcagaaggacatattcggccccaacacgacattcggccccaacacgaccattcagattggtaacagcaacaccgcgaacgtgacgaacactgttacgcaaggtgatctgtcttcactcgtagagctcctgcgcagtaagggagtggcagcggaggacctacgcacgttggagggcgcagtgaaagctgacggcgacgagcccaagaggaccaagaagctcggtcctgccgttgcgtcgtggatgggcgctgcggtgatgaaggcggcgtccggtgcgtgggacgttggcgtttcagctgctggtaccatcgttgcaggcgctctttcgggctattacggattccctatggggtag

SEQ ID NO: 535488 - DNA, 255 bp, Stenotrophomonas maltophilia
atggctgaccgtcttgcggagtacctggccgaccttgccaatgcgcgggcaatggtcctgaccgaaatggcaatccgctacccggtcggcgctgaagtggcctggcgtgcgggaaacggcttctccgccggccgggttgtcggccacccaccactctggactcgcgaccccacctgcgtccaagtggaaaaccaccgcacccggcgccgccgctgggttaccccacacgatatgccggagccgagctatggctga

SEQ ID NO: 535489 - DNA, 294 bp, Stenotrophomonas maltophilia
atgagcacgaaggagacggaaccgcagcagcttcagaatcagcgcaatgaagcacgcaagcggatgtacgaagtccagggcagcttgaactacttcctggaagtgtttggggatgagcttggggctcggcagggttggaagaacgatcttgatgggatcgatgccgtgcactactacctgatgcagaagcaccactggacgcctgcacaggtacgctcgatgactcacgaggatctgcgattcgcgctgagcgaagagatgcaagggtggactgtgccgaaaggcacgccctga

SEQ ID NO: 535490 - DNA, 279 bp, Stenotrophomonas maltophilia
atgccggccagtgccgcccgcaaaattccgcctatgccagagatcatcagcttccctcggcgcatgcgctttcaggccattcgatccttcgacgttcgcaccgggactggcggcgttgttgcggtcctgtgggcgcccctgcactccgatcaccagaaggaaagcaatcgcaagcagcatcacaaccaccccgcccttgcggagctgctgccgaatgaagcgcagacggtagtgttggtgcccgcgagcccaaccgaagcgagctatggcgatgcttag

SEQ ID NO: 535491 - DNA, 159 bp, Stenotrophomonas maltophilia
atggaactggcggccctggcactgacagatgcggtgcccgggttgattggtgaagaagcattggcagagcgcgagcgcatccgccagcgacaagagcagcaagacaaccggcagcacagcctgcctctggggaaccctgatgtaccacgcaagcattga

SEQ ID NO: 535492 - DNA, 654 bp, Stenotrophomonas maltophilia
atgtccgccgccggattgagccggcccgcttcgccccatccaatgcgcaccaaccgtcgaatgtgtcctgccaacgtccagtgcattgaagccgacgcgcgaatccctcggacaaccggttctggaggctggccgccatcgtcgtctacgcccaggtttaggccgatccactcaccgctgagtgctttcagggggccaagcttcagtcctacgaacttcccatccatcgcaggcacggcctactccattggggccggtgcgacccagtcctgtacagccgcgttgacgttcccacggtcatccacgcccacaaccaagaacttcatgtcgagcatgaggcgatcaacccgccacgttccatcggcccgtgatcgcgtcgttgcaaccacatcgaacgttcgccggtcgagaatcatgattctgccgatggcaggttggttcagaatccgaaggcgtccatctggagcatccggatcgctggaaacgggggcgctgccggcaagatatccaaaaccagcccaccggctcccaacggaacatcgaacgcgggctatcgcgcgaccattcactgccaccagtcacccccctcaaggaagatcacctgaccctcttggttcggcccagaattcgaccaaatttcaccggtgtaattga

SEQ ID NO: 535493 - DNA, 1857 bp, Stenotrophomonas maltophilia
atgagtaagcgcggctacaagttgtccgagcgccagttgcgctcgttgaccgtggcccagcggccgtcgctggacgcctcgggcaagacgatcttggtccccaaccccgacggcaagcccttccgcttccaggacgccaccacgggcagtcccaccggctttggggtgtacgtgggcatgaccgggtgttcgtttgaggtacgcaagcgggtggggaagtccttcgtgcgggtggcgctgggatcggtggacgatatgtccatcgagcaagcgcacgccaaggcgcgcgagcacctggcctacattgtggagtcgggcggggaaagcccccggcgcaagcacgaaagcgaccaggccattgccgacctacgccggatcaccgtccggcagtgcctggaccgctacattgcccgtatgcgggcccaggtggacgccggcaagcgcaaggccaattccaccaaagcggtggaaaacagcctggcccgcctggcgcgggaggaggtcggtttggccgacaagcccgttcgtgatctggacagggacatcatcgtgcgcgcctggaacaacctgcgcacctcggccatgctcaaatccaaccgtctccccgaagaggtcaaggtggcgttggccgccaaggacaaatggtggggcctggaccccgccgagtaccgggccattggattgtcgggcaagcacattcaacgggccatgtcggcgggcattgaagccgtggagcacacctttgccgatgtcagccgggccattgaattggtcctgcgtcaagagcggctggacgcagcaagggaaggccgcgatgtggtgcttcaaagcaatccgatcgagatcctgtttgacatggaactgtggcgcggcgcaaaggaaaagcgcgagcattaccgccgcgcccaggtccgcaacccattgggcaaggacgacggcacattgccggccgtcctcaaaacccttgtctaccgccgcaatttgcaaaacggcctcaacgcagtggcggtggattacctgctcctgactctattgtgggggtgccggcgcaacgaaggcgcgccgttgcagtggtattccaaggccgccgccgatgatctggcgatggagcgggtgtcgtgggtgtggttgagcgacagccccaacgtcatcaaccccaccacccggcgacgtggctcccaggtgttctttcacgacaccaagggcggcgaggttcgctttctgccggtggcctatttcgccgagcggatcttgcgcatgcgctgggccgacacccaggccgtggaggagcgcttgcccgtcgaactggacgcggcgcgcaaggccgttgcggctgtgcgcaagggcacgcgcgactacatcaagatcgccaaggccgaacaggaggtcgcccgcattgagcaaaaggcggagcgtttgaagtgggtcttcccggcgcgctcgaccaagagccgggagggtcattacagcgacagcaagtcgatcttgaagaacgtgcgcgtggacgcgggcttgctcgatctgcgcaaggagatcgacattggcttgacgccccacgacctgcgccgcacgcttggccgtttcgccgaagccctgctcggcggccggcgcatcgtttcggatatgctcaaccacaaggtgcaaaacggcgcggccaccgtcaccgacctgtacaacgaacaggagtggtcggagttgcgtgaggcctttgccaaggtggaagaggtgatgattggcaccagcccacgggtgtggaacctgctcaaaggcagcgacaagccccgcatggatgaggtcaacgatacgcccgtggcggtccattcggggctgcgcgcgcgccagggagaagaagaatga

SEQ ID NO: 535494 - DNA, 723 bp, Stenotrophomonas maltophilia
atgaccacccgcgttgaactggcccgtacgccgcaggaactggaagcggcgcggcaggcggaagcggacaagcagattgctgatgcccgcgctgggttgcgcgcttcagtgggccgggaggccgctgcgcgctacctgggcaagagcctgtccaccctcaaccgcctcaaccgaaacgggctgggcccgaagtccacggcccgcgccggcaacggcagcaacgcgcaaaacgccggcgtttcctacaccctggccgacctggaagcgtggcaggcggccaacgcgggctcctcgtacaaggccacaaaactggccaagcaagtgctgcaaaacgaccgggacattgagttgcttttgctccaagcgcgcgtgaaggagcaagacgaactcatcgccgcgctgctgaaaaaggtgggcggcaagacactggcgctcacctcgctggtggacctgacgctgcccctggagtggtgcacggccgatggggtgttggttggcaatgcccttaccgtggacaacggcacgttggcacacacactgtccagcgatggacttgtcgaactgtccatcgaagaggccttgcgcgggcgctgggcggacggcggggaattcgacatgtgggccaacgcggcgtcgcaggtgcttgatgaggagcgggcgagcctggcccagcggatcgaagcgcgcaacagccgtgaaaccatctggcggacattgcggtag

SEQ ID NO: 535495 - DNA, 399 bp, Stenotrophomonas maltophilia
atggcacgcgtcgtcacaggcaatttaaccatgctgggcaatgctcaaattacgagcaatggggtgcgccactactcgctgatcgagattggcgaccaggttctacgcaaggtcagttgtccttcgggggtcaataatttcctgtcgcgtgcgctgaatatgcagggtgaaacgacgatatatctcaacggcagtttcctgtttgccgtgacgcttcccaatggaaagacctacacgtggaaaaccagttccttcggttcggttctgattctgatcttgggcatttgtaccattccgatcatagggattggacttatcttcatctccattgcgctcaaagaactttcggtgcactccgacgccagcgcgctcatcgcgcggggcgccgtccgcgtctag

SEQ ID NO: 535496 - DNA, 696 bp, Stenotrophomonas maltophilia
atgatcaagcagatccgcatcatcgtgggcgccctcctgtgcgcttccaccctctccgctgtcgcgcagacaactgaacagttgcagcaagagaatgcacggctgcgcgcgcaactggctgcacagcaggccgctccctcacaagttccgagcggagcggcgcgactggacgccacaattcagtccatccgtgcgggccggcccgcaggctttacgaacagccacgccggattgaccatcactatgattctccgtaacaccggctcggttccgctggctttgaactaccaacagaagaccttctccgcgaccgatgacaacggccatcagtactcgctgtaccacgaacatctggtaacggcgtacagcaaagacatcaaaggcgttcccatggcatcctcgtcgcgcgcgtcaaccaatttcgtattgcaacccggccaatcgtcaccggtgaccttcatcgcgacccgcttcatgaataatgggcagacggtcggtagccgggttgatgttacggccacgttcggggcctaccaggacttgggccaaggccgaattaagcaattgcagtccttccccttctcgctcatggggcagcctatcgccaccggcgcaggctgggggcgggccgccaacgcggctggaaacgtcatcgattcgaccacggaccgcgtgttggacaagattttcaaatag

SEQ ID NO: 535497 - DNA, 345 bp, Stenotrophomonas maltophilia
atgaacacagtcaacgaatcactcgtggagcaagagcaagagcgccgtcgtgctgccgaagaagccgcacggcgcgagaccgccgggaccgttaggtggggccgcactctgcgttacctgggttgggcctgcggcctcgtgccggtgatcggcatcatcggcgtcggcctcttcctgatgctctcggtgttcttctttgcccatgccaaaaccaagggaaacaccgacggattgaaacagatgctcttctccatcggcagcctgtttggcgcattcattctctggctcatcgtgaacttcgcggtgtttgcgatgttcggcgttggcgctggcttgttccattga

SEQ ID NO: 535498 - DNA, 813 bp, Stenotrophomonas maltophilia
atggacagcctcaaacccacgaccatcgccctcttctgcatgttggctgtcgccggctgcaagaagactcacgacaccgacacggctccccaggacagcggctccaacgacgcggccgagaccagcgaagccaagccggaggccccagcgcttcccaaggcggatatcaacaagccgctgacggactaccgcgaactgaaaggcggcgaggatgtgatgttcatgtacgtcgcagcctcaaaactgccgccggactacgacaagttggccagcgcgttctcgcaggaatacaggagcacgtccgacacgttccgcaaacgcgatctgctcgctgctatcaagccgcagttggaccagggcatcgccgacgccaaggcaaacccctattactgggtgacgctggaagacgcgaatttggccccctacgatttcgaccgccatggcttccccttgaacgatttcgatgggagcaagcggcactatttcaccgattacttatttttctacacctggatcaacaaccagcaggtggcgtttgctcccgtcccagacgaggcgaatgcccgcgcgttggaagccaaccgcacgaagtggaatgccaagccacagttgcgtgtctacttttttgcgcaatcggccgacctgaacgccaacgcgaccaatgcttatgtcactagggtgaaggtgttcgacaaggccggaaaggtgatggctgactacggtccggacgcaagcaagccagcgcaacctcccaaagacccggaatgcggcgatcccgcatcatgtgcagcgcaagccgccgccggcttttaa

SEQ ID NO: 535499 - DNA, 1122 bp, Stenotrophomonas maltophilia
atgaacaggacactgctgcaacaactctacggaggcgtgacctcacctggccaactccacggctttgtggacaacctggccaaggcggtcggttgccactccggtagcctcacggtgcgcaatctggccaagggaactcatgtctccctagtggcggccggctcgatggcggacccgcgcacggtcgagcaattcaaccaagaatcctcgtacacccgagacaacctctggctggcgcggctcgcaccttttatcaaggcaggcgcagtgctggtcagcgacgacgtggcgagcacggtggaaatgcggcccacccgctactatagagatttcctgcaccagattgacgcgctccgctcgatcgccatgtgcgcgacggcgacccccggctcgctaacattgatgaccttcgtgggatcggagcgacggggcaatttcactcctgccgaaagatcgctttttcagtcgctggctccccactgggtcaacgcatttagccttcggcaagcgtttcagcatgcctggaagcaacccggaacgctcgccatgctccttctggatcggcaactgcgcgttctgtccaccaacgccgacggcgaaggcctgttgctctcgcgcgtgctgcgcgcgcgacgcggtgcggcggtggaacccttgcaccccacctctcgtgccttgttcgccgaagcgtgccgcaaggtatcggcagggtccgacaacaacagtcccgagggcatgttccctctgtacatgaccgacggttcgctgtgcggcttcggctccgtcaaggcctacggtacgcttctgcccggcgaaggcgtcgccagttacgctttggtggtcaacaccctagcccggcgctccgccgaaggcctggcgagcacgctgcgcaatatgttcgccctcaccccagccgaagccgcgctggcgattgccgtgtatgagttcggcgaactggcaacggcggcgcagtgctgcaagatcaccacggccacggcacgcacgcgactgcaagccatctttgagaagaccagaacacatcgccagatcgatctgacacggatggtggaaaacctcaattcgatgctgtccacgaccccggttgacccaagcacgcactaa

SEQ ID NO: 535500 - DNA, 453 bp, Stenotrophomonas maltophilia
atggccactattcactcccacctggtcgatcccatcgccaacacccacctctttgttgtggagaccaccgcccggcgcggtggccgcctgtgggggcaccccgcaatcctgcgcaccgttcgcgttcccggcgacctggccgaacgcattgccgatggcgacatccgccgcttcaagcaagcgggcttggaagtcttggccgagtacgaggtggacgcccgctgccagggtcccaactccggctttggacgcacgttatcggccatgcaggccgcccttgccacccacttgccccaccccagcgccgccgttcgcggaccattggacgagggtcaggcgtgcacgggcgacgaactgcgctccttcatgggcaatcttcgcttggaaatagccattcaagccctgccggagtacaacgccaagagcggcgaattccgcaaccgcttgatgtga

SEQ ID NO: 535501 - DNA, 522 bp, Stenotrophomonas maltophilia
atgagtgatattgaagtgagcgtatttaatgtacaagatgtcagcgaggatcaagatcaaagcgacttaatgttcgacgtggttgtgggcaagaatggcggctttgcttaccgctttgtggccaccaagcgcgacgacaatctgtactacgacggcgatcaggagtttgccgacgacacactgtaccaactggtgtgggacagcattgacgagttgaatgccaacgaacaggccgaagtgctgttgaaggtcgtggacagttggagtgagcatttggtgcgggacaatctgtgggttgtcttgcgaagcgaatacagcgcagcggagcaagcggcaatggcacccggcgcatattgcttgatgaataacgacacgtgcgtcccatttgacaccgccgcgcagtacattgacctcatttcgcgcgctgaccaagacggcattgaggcgctggcccaagccgccaccatccgtcacgcgctgggtgtgcagacggctgccgcttcaacctcacgcaagatgtaa

SEQ ID NO: 535502 - DNA, 1461 bp, Stenotrophomonas maltophilia
atgatcaaaacacgtatattttatgttgcactggttgcggcgctgtccttttccaatgccgctttggcctatacgctgacagatgagcagcgaaatattttgaaagatagcgagtttacggacgaagaaatcgcccgggtgtcgtacatgtccagtcgcgtagattcatcgggaaactacgtgtacaccgtacgattcgaccaagattttaagatttttaataaatctggccacactcaagcaaatttaaccacgccgcccaatgcaagcggttaccacgccaccgccaccggccaagcggctgaggcaagtgaggtttttgctacggccaacggcacggcttcgaccgcttccagcatgggcgcaaccgccatcggcgccttgagcaccgcaagtggtaacaattccaccgccgttggatttagtgcgtatggcttcggaccaagttcggtggccattggctcgtactcgctggccggtgacagcgccattgccattggcaacatgtcttcagccagcgaaacgggttcggtggccattggtaatatggcaagcgcctccgccctatggtgccttgccttgggctccaactcggtgtgcgacgaagcaaacaccgtttcggtgggcagcgcgggtgacgcccgccggctggtaaacgttggtgctggcaaaaacgaaacagatgcggtgaacgtttaccagttaaattccctgtcgtccgccttgggcggaagcgcaggtttttcaaacggatctttcaagggttggtcggtgccgttggctgacggcacgtacaacaacgtgtacgacgcgttggtgtccctcgacggccgtatcgtgccttctttggaaaacagcccggttgattcaggcgaacccagtgcatccaccaccgttgcggccggcagcaacatcgaaaccagcaccgacaaccagggcaacaccaccgtgtcgctgtcggatcaggtgcagttgtccgatcagggtagcgtgcaggtgggcggcagcacactcaacgcccaagggttgaccatccagggcgggccgagcgtcaccagcaacggtgttgacgcgggcaatcagcgcgttaccagtgtggcgaatggccgaattgaacagggttccaccgacgccgtgaacggcggacaggtgtgggatatgcagcagaacttcaacgaccgctgggaagccaccaacgcgcgcattgatcgcttggacgatcgtatgaacgcactgggtgccaagtcggccgccatggcgcaaatggccgctgcaagcaccccgctggccgtcggtgaagcggcggtgacggccggcgttggtttttcgtccaaccgttcggcagtggccgtgggctaccgtgtgcgggtgagcgaacgcaccagcgtgtcggccggctttgccgttggtggtggctcaagcgccatgggtggcgttggcgtgcagatcaacctgcggtaa

SEQ ID NO: 535503 - DNA, 516 bp, Stenotrophomonas maltophilia
atgcacacaacatcaactcgaaacaaggccgttggcgtcacccttgccattggatgggccgtgattctcacggccgtgtggggaatattcacccccgctcgcgcggccaatgccctggccaccgactacaccggcttcgtacaggtggacggaaagcctgccgctggcgttccggtggcgctgcgccatccgtccacgggccgcattctcgttcgctacaccaatgcacaaggccgctatcgcttcaacaacgttagtcccgatggcgtgtacagcgtcgaagcgctcggccaagtgcaccagcgccgcgccttccagggcaccacgttccgccacgacttcaagggcggcagttgcagcggggattcgggcgcaactctctccgagcccggatggaggccccccgcaaagggggcttccttttttacatcgtccgcgcggtacatgcgcaccaaacaaagttctactgcaaaaaaagccgccagtgggcggctttctattgaatgctacttatga

SEQ ID NO: 535504 - DNA, 516 bp, Stenotrophomonas maltophilia
atgaatttaattaagattgctggtcaagtctgccggaacaacgaccaaaatacaaccaacctgctaaaccaagtcaatcagtttagtaagggtcaaaacgatttgcagaagatcaaactgcaacaagaggaagaaaagcgggagcgtgccaaacgccgccacgaacttgaagatattcagcgcatccaagagttgagccgcgaagtcgaagacctaaaaagcaaattgcggcgcgcggaacataaaagtgaagttttacgcgatatggcggcggatgttgttttggatcgttcaagcattctcaacacaataatggttttaaaaaacgagtggacaactcctgcgcaagccgaagagtttagagcggattttaataaattccgcgaacatgaaaaagaaaaaatcgaagcggatgaagagcaacaaaaccaggcataccaattggtggatgaagtcctcagcggctggtctcacccgtcttccacccgccgccgccgcccacctggtcataagtag

SEQ ID NO: 535505 - DNA, 2634 bp, Stenotrophomonas maltophilia
atgcttaacaccacgaaactgtcggggcaaggcgccatcgactatctccgcgcggcagaatattaccgcagcgccgaagaccgggacgtgccgcccatgcactgggttggcaacgggctttcggccattggcttggcgcacggcgccgtggcccaggacgccgatttcgtcaacatctgccggggattcaccccaggcggtgcggcgatggtgcagaacgcgggcgaagacgatcgcgtgattggaatcgattggacgttcagcgccgacaagtccatgtccgcattgatggccgtggaggcaccggagcggcgcgacgccatcatccgtgcccaccaaacagccgtacgcaaggccatcggctatgtggagcaattcgccgaagtgcgcaccggaagcaagggcgcaacggtcgaacggcccgccggcatcattgccgccgaagtgctgcatttctccaaccgcaatctggacgaaaaccttcactcccatgtcttggtgatgaacgtggcgcccaccgttgacggccgcacggtggtcttggaaacggagtggatgttgaagcaccatgcggccgtcagcgctttgtaccgagccgagtgcgcgcaccagatgcagcaactgggctacggcgtcacgcaggtgcgcgcactgaacgacgaccaggagttgcagcgcgaaaagggtcatgtgtatttcacgatcactggattcgatgacacctggcgcaagccgctgtccacgcgccgcgacgagattctggcccaccaggcggagaacggcggcaccacccagcaagccagcatcgccacgcgccaaaacaagggcgaaccgccgttctccgaatgcctggacgcgtggaagcagcgccacgaagacctgctggcccagggcattgccaagcccgtggagcagttgcgtggccaggccaacgtgctggacgttcccgacgacaaggccatgctggcgttgtttgacgagagcaacaacgccgtgcagcgcaagggcgatctcatcgcccgcgtggccatggaaaacgttggccgcctgtcgttcgaccagtgcattgccgaagccgaccggctgattgacaccatgatcgagcgcggcgacatgcaccgcaacgcccccatcaagggtgtggactaccgcaaggaatccggcgtgtacaacgaactgcgcttttccaccgaccgcgaggtgttccgcgagcaggactgcgtgcgccgcgccttggcgcgccaggacgatcaggcggtgcgcgtgccctcctccacggtggacaaggccattgccgatttcgccaacgaggccggctttgcgctgtccgacgagcagcaaaacgccttgcgacacgtgtgcgagcgcacggggggcacggcgcagatcatcggcgacgcgggcaccggcaagaccacgttgatgaaggccgctgtgcaggccttcgccggcaacggtcgggaggtgatgggtgtgtgcattgcgtgggacgcggccaagaaattcgaggccgaaaccggcgcgcccagcacctccgcagcccaattcattgccgacttgaagaacgaccgcctccacctcacccccaacacagtggtggtgctggacgaggcggcgatggccggctccaagaccatccacgctgtgattgcggccgtggacaaggccggcggcaaaaccattctgatgggcgaccacaagcagttgcagccgattgaggccgggggcacgttccgcctggtggggtcggctatcggtagtgcgcgtttgtccgatatccgccgccagaaatccgagcaggatctggccaccgccaaggtcttttacaaggacgcgcggcaagcgtacgagcggatggagaaggccggtcaggtgagcgaatacgccgacagtaaagccgccatcaccgcattggtcggagactacgcgcgctcctcctccccactcaacgagcgcttggtgctggtgggcacacacaaggaagcccgcaccgtctccgaccacatccgagaagtgatgaaggcgaacggcaccatccggggcaaggagcacaccttccgctgcaaaaccgggcgctgggaagaatccatccacctggcctgtggcgaccgcatccgcttcaccaaaaaatccaaggaactgggcgtgttcaatggctccaaagccaccattgagcgtattgacggcaccatcgtgcattgcaagttggaaagcgacatcgccgcgcagaatggccggcgcatggcgtttgacatcaccaagaccaacaccgtgaactacgactgggcggtgaccgtgcacaaatcccagggccagagcaaggccgaggtgttccagttggccaatccgcagatgtcggattaccactcctccatggtcggattcacccgaatgaagcagaagttccacctgtacggcgcaagcgaggacatcgccaccttcaagcggcgggtgggcgttgagcggctgaaagagaacgcggtggattcgctgatcacgccccagaagaccgccaagcagcaggtggtggacctgattgcacgggtcaaggccgcgtttcggccggccccacatcagcagcccgaacccacgcaacagaaggtgaggcagcggtcccacgagatggagcgttga

SEQ ID NO: 535506 - DNA, 1932 bp, Stenotrophomonas maltophilia
atgagcgacaagaaggcccccctcatcaagccggagccaatcctggatgtcttcggctcgctgccacaaacactggccccgactgatctggtgcgcaggtgggaccacgcccttgcctacggcggcttgattggcttgggcgctttcgcgctcgccgacggcttgcttgctggcacgcttgccagcaacgccagcgaatggtggcttcacgcgcgcggcatggctgtgtgggaccaggattaccgcgaacttctgcgcagcatggacacggtgaaaccgatggtgtactcggcgctgtcgtacgccaccgcccttgtcaccggcctgtgggtgagcaaggggcaactcaaaccctaccgccacatgcgccacctgtccggcccgcaactgcgctggggcgcggaggctgtggactacatccaccgctgtgccggcgccttggtgggcagcggcaagccgtgggcctacctgcacccggacgtgccgatcggcaagaccacggccacgcgcggcttcaccgtggagggcggcattggctcgggcaagtcggtgtttcagaagcagttctatcgccagatgttccgcgcccaccgccgctgcctggtggccgattttaagggcgacatgacggagacgttttacggcggcaagtacaaatattgccgcatcttctcgccctgggatgcgcgcagcgtgcggtggaacatcgccgccgacatcaacatacctgaccgcgcgttggccttcgccaatgccttggtggacaacaagggaggcgagaacaacccctactggtccctgggcgcgagcgacatcatcaccggcgtgttgattggactgatgacccgtcaccccggtacatggtcgctggaaatggcgtccacgaccttgttgctgccgcaagagcagttgcacgacttcctggcgaagtaccggcccacggccgccaagttcgtggccgagaacgtgaagagcgcgggcgacatggtgggcacgttgtcagcctacacccgcaccatccacgaactggccaaggcctggccgacggtttccgaagccgagccgttctcgtggctggagtggctgaccaatccgcagattcgccaacgccagatcatcgtgcaggctggacccgacgaacagtccaccgcgatgctgatggggtcaatttttacctacatcaccaaccttctcggcaacagtgaggtgctgcccgacaaggaaatcgagcgcgatctctgctttctcattgacgaggccgcgcaatggggtcgcttccccatcaaccgcatgatcgaaactggacgatcgaagggttgcgtggtgatgcttggcttccaagcccgcgcgcagttgcgcaagatatggggcgaggaaaccgccgaaaccatcctctcctccatccccaccaagatcatcctgtggcttgacgatagtgcgcggaaggtggttgccgaatcattcggctaccggcgcgtggtcaccacgctgccgaactacaacaacagcgaaggcggcacgagcagcacgctcggaattaaggaagagagccgtgccgtggtcgatccctacgacatcgccacgcgctgcggcgtgttgaagggaccgcagtacccggccaaccacgcggtgcgcggaatcctgtcgcttccgggctgcgaccccaccattcttcaatggggagggcgcagttgggccaagacggccttgggtcgcatcggagccgcttggacccgcgcgcccatgaaggagaagacctggcgcgaactacacggcatttttgccccaccgcacgaagacgcgttgcaagcctgccgcgacatcgtggcgctgttcgacaagcacgccgaagccattgcctcgcgccgcgccgcgcagacgaaattgctgaattctctgcgcgaaacacacctaggagtgacccatgcttaa

SEQ ID NO: 535507 - DNA, 612 bp, Stenotrophomonas maltophilia
atgatggacctcccccccaaccttccgccgaacctgtcgaatacggcgcagtacgtgatgcttttcgacgcctcaaagcccagcagtagtcagcgcttcaacgtactggatctgcgcggccccacgcccaccgttgttctgcgatcgaccgttgcccacggcagcggttcggatcggaataaggatggtgtggctgacgtgttcggcagcgcgcccgaaagccacatgaccagcctgggcctgtatcggataggcccatcgtatacgggcaaatacggcacttcgtacctgctcgatggcctcgatccgaccaacagcaacgcacgtgcgcgcaacgtcgtcctgcacccggcgccctatgtcaccgccaccaacgcgggccgctcctggggctgtccggcggtcagccaagccacgatggacaccttgcgcagcaagggtgtgttcggcgccaacacctacctcgtgatctacaccccctcctccaccaccaactggaccgccttccacaaggagacgccacacacagaacaggagcacccatggacttcaacgagttataccttcgcggcgtggcacgcaacaacacccaggatgtcggtcatgcgttga

SEQ ID NO: 535508 - DNA, 702 bp, Stenotrophomonas maltophilia
atgatcgacctttcaaaccctgaagattttattaaagacgagcacatgcacgccaactacaaagcatgggtggagcgctatcaacgccaacccggcattgcggtggacgaacattccaaagccgtcggcggggcgggcttcaccacccgcgacacgcccaattatcacgatcacctggacagccgaaaaaaggaattggagtacgccacggggcccgacaaggagcgcttggggttgctgtacaccgccgaacgggcggcctgcacgatgaccagccatcacgatcagcgccagtccatgcagcaattgatggagtacgaccgcagccaccgccatcccatcaccgaccccagccgcgacctggccgcaaacccgccgacaatggcggagaagcaccattggttcacgcgcgacgaccgcgccttgcagcccaaggagcaagagcatctgaccgccaagggttgggacgacagccagcggcccaacgcccagcagtccgccgaattgaccaacgatcaagacgacaaatggtacatccaccccactgtgcgcccccaaatcgagcaggcccaacaaaccatcgaaagccgtcagcgcgaacagcagcagaccatggtccccgaggtggaccagcacgctatggacaaaagcgcctttcacgccgccgttgcccaccgccgaaacggagggctcgaacgatga

SEQ ID NO: 535509 - DNA, 2550 bp, Stenotrophomonas maltophilia
atgaagacactcgcgatgcttatgcctgtccgcgccatggcgcaaaaggccattgaattcacccagtacaccaagggccggtgggatgtgcccacgggtgactgggtgcccaacgatctgcgcgacaccagccccgtgttgccctacaccgccgaccgcaaactcaccgcaggaatgctgctgtccccggacggacgcgaccgctcacgcttcaatccggctgtgctgattgcagccagcctcatgccgctggccgtgttggtgatcgcgctgggcccgctgatgccccaagccgtgttgcatgcgtccgtgctctccacatccgccatggggcttttgttggcgggcttcgccacctgggtgatggcacgcaaccgtatgccactgggcaccgtggccaaggctgttgcgttgggattcgttgtgccgctcatcggcctggcggtgagcagcggtgcgctgtcggcactgggcaacgctggcgcaaacatcggcaacaccgcgcaatccttgcttcgtgttgtgggaggaggcggcttcctgggtgggctgttcgttgtgatgttcctgctgtggctgatctcgttctttaccccgtacgccaagcgccccaagaagatcctctatcacgttgtactcgccgtcgcactgctcgcagtggtggtcagcctgatgcccggttgcgcgtttcttctcaccatcctctacgcctcgtacgcaccccgatccatttacaacggttgggacaagcagcgcgcccgctggctggccgcacgcggaacgaagtttggcggccaaactttgggccacaacctggacgcgcacatcgaggtgcgggcacagcaggccaagaaggcggcagccgacgacaaggagaacccgaacctgatttattgcggcgcggccaccggcacattaaatcagcgccgcgacccctacgccccagacgcgggcggccgcctgatgatgaacaagaacgacacggccacccacttcctcgtggttggtgaaacgggtgccggcaaaaccgacagcattgtcaaaccctacgtaacgcaatggatgattgggggaatgggcggctgctgcatttacgacggcaagtcggatttggctttgcagttcgccgatatcccaggcttcaccgtcatcacccctcccatttacgacaccaaaagtggtgagaaggtgagcgatggcgtgaccattgggttggtcgaaaacagcattcccggccttgtcaccgaaacattggccgccgtgctgggcaacgccaacaaacagcaggcacagaaggacaacgacgagtattttaagaatcaggcgatgaacctgggtaagcacgccgagcaattttgctactggctggcgcaaaccgaccaccacattatcgctaaaggctgggcggcggaggactacaagcgcacgtggttgtggtcggcgtacgacattcgccgcgccatcaagttgctggccaagaccgacggaattttggatggcgacacccgcgagcggccggtggagcagtggattgagcgcttgcggcaatactgccccgtgcccgtggagcacaaccccatgctgcaagaggccattgactacatccaagaggacatcaaggcaatggccaggcgcgacaaggaatggggcggaattgtaagcagcgccattttgtactacgacaagttgatgcaaaaccgttctattcgggaatgggcgcgcaccgaaaaaggatcaatcaacgtcaatgcgtgcttgcatggcgcgtggatgggcgtttacctgcctctgtcgtttggcgaatcgggactgctggcccaagcgctcatccgcttgcagcaaaccaccgagggccgcaatcgaggcaacaactggcgcgaagaagaccccagcgcaaacgattgcctgtttgtgctggacgaagcccaacgcatcctcacgccaaaggacgaggagacgctttcgcttggtcgcagccaaggcattcgtatgttgtgcgccacacaatccatctccgcgttcgtggagcgcttcggcgaagtgggcgtgaaggttatggcgaccaacttcttatcatggggtctgatgcgctccaacgccgagtcgttccaattcctcggcgcgaagttgggcaaaaccttccgcccgcgcggcagcgatgtacaagccaccaagcccgatgattttatgacccaaaccataagtttgaacaaccccaccaacgactgggaagcggcgttcggcggcgaaacaatggaattgctggcggcccaagactatgggatggcggtgccacgccttgttcggggggtggacgactacgacgaagcaatggactcgttcgcgcgcaacgaaatgttcattgccgaagccacctccggcaaggccgagcacttggatttggtggaggaagcagactttcacgccctgtccaagggccaaggttatgccctgatgtccgttcgccgaggcggtgtggaccgccgcgatttcgtccgcctgcaacccatgaaaaccatcgatccggcttggtttaccaaggtggcgtag

SEQ ID NO: 535510 - DNA, 384 bp, Stenotrophomonas maltophilia
atgtatacacccaacccaaaagacgttgagcaaatcaacaccgtggccaaggccatggccaccccccgaagtaatccactgtcccagccggtgcgcacattgctaaccgaccgcatcaacgacgcgctgtgcagcgtggtcattggtacaaccgattccataaacagtgcggccggcgtgtccattacctacgacggcttctatcaccagccccaccgccgcatgcaaatttcagagaaggattggagcccagagttggaacgccgactggtggccgcgcacattttccgcatgcaactgtgcaaaaagatcgcaacgttgcttccccttgcagtggcgggactggctgtggccgcgtccatcgctctcaccatcaaattttga

SEQ ID NO: 535511 - DNA, 717 bp, Stenotrophomonas maltophilia
atgatcaacaattttgattggaacagcatgcttggtgggggcgctcagccctccgcctcagtggcaccgcaacccgagaaaaaacccaccgacgcacccctcgcacaggacgacgccaacgcgctgctgaacgccgacacgcagcaagcgattcgcgatggtgcgcagaaggccaaggccacaaccaaagcggcggcggttggcatgcgtcaccaggtcaagcacctggtgtccgtcatgcgccttcactgggcagccgcgcgcctggaccgcatcaaccgccgcttggagcggcagaccgcgcgcaccgaagcacgggtggcgcgcatggaaggaaaggcacagcgcggcactgcaaaggtttggatctttggagccgtggccgtcgcgattgttggcgcgactgtcggtgggtggctgcacgtgcgcaacaaccactccacgccagcggcacaaacccacggcgtggctcatcccacccccgccccagcgacgacggtgaagccgcaagccacaccgatgccgacggcacccgcgccgcagacggagtcgaaggcgacagcggttgaggtggcgaagccacttccacccaagcggccgaaggccggcacccgcgcccaaacaccccaacacaccgaacccaagaagaacgacgacaacgcctggcaggacaaagccaacgccgatctggattcgttcttcaaccaacacaagtga

SEQ ID NO: 535512 - DNA, 609 bp, Stenotrophomonas maltophilia
atgaaaaaccagaaagccatcgctgcattgattgcagcaacactcatcaccagcggctgcgccaccatgccgcaaggagccaccaccgacaaaggccaggttgccaaagttgggttgggcggagccgccatcgggtgcgccgtcggcgcgttgggcgcaaaactgttcggcggcggcaacctgggcacggcgtgcattaccgcaggtgcagccacaggcgttgcggccgcagtcgccgaacgcaaccgccaagttaaggaagcacaggccgttgccgagcaagcgcgtctggccggcttgaaagccaccgtcaccgtcggccaagtgcattcggccgatgcccgagacaagggcgagcaactgaagagcatgcgcattgagttgccggccgacagcaacactccgaccgtgcaacaggtgttgtcccgcacagcggccatgagcgacgccagcaaggtgccggtgaccatcacggtgtacggcagccccaagcagcgcagtgcggtggtggccagtctgcggaagaacttgcaggccaacacccgcaccaccgtcaccgaagccgaaggcacaccggccttggtgctctcgcccgctccgcagatttaa

SEQ ID NO: 535513 - DNA, 165 bp, Stenotrophomonas maltophilia
atgaaaacaaaagaaatctatgccatggccgagcaattaaccgaagcgctcatcgccgacggccccgccttatacgactcaatatcgttcgatcaggtgcaaaccctcgccgcgctgtacgtggcggtgaaagacctgatcgacaccgaacaagagaacgactaa

SEQ ID NO: 535514 - DNA, 339 bp, Stenotrophomonas maltophilia
atggcaaagcacaagacaaccacacggattgatacagcggtgaaggcctacattgaagccgaagccgcgcgcctgggtgtaagcgaatcccaggttatcggccaaatcctagactcgcatatgcgctcggctcccattgtggagcgctccattgagcaggccgcagccgatctgcaccagcacatcgccgacacaaccagggccaaccacaccgaagtggtcgccctgctgtccaccgttttggaagcactgctgaaacttattgaaaccagtgcgagcagcaggcaatccgccaccccggcacagcgtgccgcattctttcaacccaacaacaactga

SEQ ID NO: 535515 - DNA, 711 bp, Stenotrophomonas maltophilia
atgaatgaaatgaatgaagcgacggtggacactctgtgccttgacccgacggtgggccaggtcatcgacgtggcccgacgtatgaagtctctgaacaagcgtctccctgcctgggctctgtccatcgccacgcacgatcaggcggggcgctgcttctggtgctccaagcccggcttggtgctcgtggccgatcgcctcatccgctgcgaggccggcggcaccaacgctccgagcaatacgatggctgtgtgtgtgtcgtgccgctctaaggtcggcactgccgaccctttggcctggtgcctgggcgatccggcgaaactggaacggcgtggtcaggcattggacctggggctgtgtcaccccgcgaccgaagcgctgcgagaccgtggaacgaaactcaaacgactgcgcgcgagatgggagcacccgcgcttcgttgccttcctgcaccgtggccggcacggctcaacgatggtgtggccggccaaggccatgccccctgcgcaccttgtggcactgctgcgcgccagcggcttcgtggagcggcacgcgcaatggcgggcggccgtcatccctgcggagagggcagacgccttgctggcgctgctggtggagcacaacgccctgctgcgctccgtgtcctccgctgactccgaaccgcgctggctgcgcctggcttgcggggtacgtgccgccgtcaaggtcaactag

SEQ ID NO: 535516 - DNA, 519 bp, Stenotrophomonas maltophilia
atgggtattacacgacagcaatggagcgaggcgcgttcggtggccgccaccgaacgggttcagcgagttacaaaagaatggaacgccgcgcgggcacggcggtttaatctggacgtaagggaagcgctttgcacaccgccgcaaacgggacgcccgcagccgttcaccaacctacaactggcctgccgcgcagccgacctgaacaaggtccaagaaattattgagcaaggcatattgcttaacaccaaaggtccattcaactggacggcactccacgtcaccgctatggcctttgcctcaaccgccgttgacagcaagcgcgccacgctcaacgccattgcgcaactgttgctgaataacggcgcggacgtgggagcgcgcgacgcaatgggtttgaccccgatggcgtgcagcaaaggcgtggtgccaccggccattcgtaccgccgcgcgggcggcatttactcccgaccccgacgaccatggggccggtgaacgccagtaccgttggattgtttga

SEQ ID NO: 535517 - DNA, 180 bp, Stenotrophomonas maltophilia
atgttaacggttaaacgcataagacaatggctgtactacggtctaatggcttggggatttttttattttgacatcccaggccgcaccgacgagcaattgagcagtatgaattcggcaattaacgacctttccgccaagcaccacttggaaggcatcgatatttacagcagcacccactaa

SEQ ID NO: 535518 - DNA, 378 bp, Stenotrophomonas maltophilia
atgcaaattatccattttacacgcagcgcccattacacctatgccgtggccatttgcccgacacgtggccccaattggcggactcagaaggaagcccgcgttattcgcttcaacaccttgggcattgccgatcccttggcgctcaccgccgtcccacgcgaatgccaagtgcaagtattgaagcgcagttccctgcaactgggcggtcatggcctgaaagaaaagttgcgtcaggcggtgctcaattgcgctatcaattgctgcaacgaacaggccgttgcacagtgcttggaagatgttcggcgcggaatcgccttcccccacaccgaccgcagccaacgctacgccattttgggagagcgccatgttaacggttaa

SEQ ID NO: 535519 - DNA, 309 bp, Stenotrophomonas maltophilia
atgcactacgttcgtttaaacatccgcttgcccttggagcagcacaatgctgtgtccacgcgctgtcaaacggtgaaagccgccaccaacttgcatgtgtctatttccaacatggtgaagtccatcgtgcttgatccggcacggccgcgaaaggtgaagccgcacgcaatggatgcccgcgcaaaaaaaaccatgatgtgcgtgccgttaacactacgggagtacgaaactttgcgcgccgaggccagggttaacggtatttcggcggcggcattggtgcgaacacgactgcaccacgcgcttcaataa

SEQ ID NO: 535520 - DNA, 816 bp, Stenotrophomonas maltophilia
atgaatacaagaattcccctttcttttgcccgaagtgcattgttcgcgccgttggagcacaacggtaaaacggttaacggcgagcaagtggcggcggcgtgctacgggagttggtctgtttccatcgagtacagcggcaccaaactgtcgccctctcacgctttggtgtggcaggtagtggttggtttggcaattaagaacgaacaactgaatgaagtggaggtgtccacccgcgatgtcctgcgtcatttggggcgcaaatcggacacccgcagcaagtattggctgctcacattgctggccgaactaaaccaatgccaattaaaaatcaccacgcccgcgcattcgttttccggtcctttgctgggttcggtggaagtgttggatcgcggaatgctacgcttgtcattgccacccgatacgcttcctctgctgtccaacgaatacgcgcgcgtacggctggacgataaaatcggtcttgctcaacacgcgatggcagcgtggcttttcgattattgcgccacgctgaaaccaggcttttgcatcccagtggtcgatttgcagcggatgtgcggcaacacggcaaccattgggacgtttggtcgcaccttaaaagccgcgctgaacgtgttggtgacgcgcaaggccatcgacggctacagcatcgaaagcggcgtactgaaactgtccaaggcgccgggaaaggtggtgctgctgagtggcgataagcaatcaaatgtccagcgccgtacaaactaccgcaccgctgtacagcacgccaacgcagcgcggtcccgcatcacagccaacctgtag

SEQ ID NO: 535521 - DNA, 1272 bp, Stenotrophomonas maltophilia
atgtttgatttgtgcctgttcgatctggacaacacgcttcttcgcaccgacgatctggaagatatacgtccgaaaggggtggggcagcaatccaatgacgcctacaaagttgaattgctccagcgtttcgggaatccggcggagcgttttatctacacgcctgcgcacctggcggccttgaaggcccgctggcccgatatgaagttcggcatatttacccgttctccgtgggcgtacgcgcaggcgattgatggtaaggcctatcctcattttgagtgggacgttggggttgcctacgaaacggttccgaacggactttacaagccaaatggctgggggattcgtgagtgcatgcgccaggctggtgttaccgatcccagccgtgtggtcatggtcggcgatgaggcggccgatgtgaaggcagcctacaacgccggttgctgggcggttcttgataaggcgtcttggccccacatgcggtgggacagtcgcaagcatttcggcgcgttggaactgatcccggatgccgtgattggcggtccagatgaattgcttgccgtgcttgccaacattgaatcccacgcgcctcatttggaatgggagttcaaccaatcaatggatcgatcgcaccagccgcgcttctcatcggtgaatcaattttacccacgggaggtaggtgagccggataaggcgaaagaggagatccattctgcgggtcggcatttttccgattacaaatccttggacaatcgacggtcgtggcatgcacttaccgcaagcatccatcaaaataaggatgtccatcaattccccgtgcagtggtgtaacaccgtgcacgctttcgttcgcaagtcctttcctttgctccatttcctcaatggaattgtaaccgttgccgccattcctgcacggcctgggcgcaatccgcgcatgcagcacttcattgcccagttgcacgatgatttcaggcagcgccctgcattgggtcgaacgcatgacaccgtgcaattcaatacaacactgctttcctacaccgatggggttcgctcccagagcaatgaacatctcaatcgcgttcagcgttttgagaatgtgcgtgatcacctcgtggtgacagatgcagccaatattattgggaaggattttgttatcattgatgacgtgtgcaccagtggcgcgacattgatgtacgccaagaagcgcttgaaagaagcgggtgcgcgaaatgtggtgttgtttgccctatcaaagaacgtgagtgatgtgttgtga

SEQ ID NO: 535522 - DNA, 942 bp, Stenotrophomonas maltophilia
atgctcaagggcgtggggcccgcgtctttgcgcctggcgctgaacgtggccaattttccaacggcgcccatcgaagccattgtcaagcaggttccacgtctggcaatggccgtgcaaccggccttgtggagcgacgctctggaaaaggccgagatgcaggtggagttggccgagaagaacggcgcgcgcattttgtcggttctcgatccggaataccccgcgctgttgaaggcgaccaaggacgatccggtcattttgtttgttaaggggcgcttggccgacaagcctgatcaatcggtggccgtcatcggcacgcgcgagcccaccaagcacggcgtcatgatcgccgaacgcatcagccagttcttggtggacaacgactggtcggtggtcagcggcttggcgctgggtttggacgctgttgcccatcaggcggcgttgaaggcggatgggcacaccgtggcggtgatggcccacgggttgcacaccgtcgcgccctccaagcacaaggccttggcccaagagattttggacaaggggggggcgctggtgtcggaataccgcttcggcgtggacccacgcccggagtttttcgtcaagcgcgaccgcatccaagcgggcttggcccagggcgtggtgatggtgcaatcggatgtgaagggtggaagcctgcacgccagccgcgctgcgctggactacggccggtggttggccgtgccggaacccaccaagttggatgcggacaacatggagcccaaggtgcaggccaacgcgctgatcgctttcggtaacagcggaaggaccgccgatttgttgatgtgcgctccatccgatgtccgccgggtgattgtgctgcgcactcgcgaagactaccccaggctgttgggattgtcctcgacgccagtggatggaggcgtgatgccgcaagtggggttgttatag

SEQ ID NO: 535523 - DNA, 1857 bp, Stenotrophomonas maltophilia
atgaaaaaaagtgcaccccaaaacagcaaagcgcaggagagaaccgagaagcgctataccttcaacgactacgccaccgaactggccaactcattgatgacgatgatcccccgcgcatgggaaaagccatggcaagcaggtcacgcgcccgatgggctggtcctgccctacaacgccaccaccggtattgaatacaaaggttcaaacacctttcgattgctcggcgaacagatggccaacggctactcagatccgcgctggctgacgtaccggcaagcccaggagttgggtgggcatgtggccaaaggccagaagggcaccacctgcgtgaagtggatttttaaggacgtggaggaagatcgtcctgacggcagcaaagagaaggtcgaacgcggcttcccatcgttctttacgctgttcaacgcacaacagtgcgaagggattccagccttgcccgtacgcgagccggtgccggaatcattccgccacgaggagtgcgaacgcctgttgcgcgagtgcggcgctaagatcaccaacgatggtggcgatcgcgcctactaccgtccgagcaccgacagcattcacctgcccactaaggaggcgtttgcggccaagggcccaggaggtgtggaccactactactccaccgcgttccacgaggtttcgcactggaccggtgctctccatcgcctcaaccgcgacctgtcgggtaagtttgggagcgtcgaatacgccaaggaagaactacgggccgagataggctcgatgttggttgctgcgcgcatggacatcgggcgcgatccggagcacatcgccaatcaccatgcgtatctgaaacattggttgaccatcgcaaaaagtgatccacaagaggtggtgcgggcgtgccgggatgccgaaaaaatttgccagtttctcaacatcccggtgcccgagcacgagcccaccacgggtcgtggcgttgacaacgcggccgcgttggcagacgccaattcgccgctggaccaatcgctggtggagcgcggtgccttgatcgccggtatgcacggcgttttggtggagcgctttgaccccaaatctccgcaggaggaagccttgggcaagggatggggctacactggctcaaccacgtttatgcatgctgctggtggcttcggcagccgcgaagagtgcttgcaacacattgccaagacacacgggacttcgattcaataccagattccgcgcaatgttgacatcggctttttcgatcatcgcacggacacatgggtgccattcaaggtgctggacatcatcgatgacaggacggctgtggtcatcgatcaacgcaacctcgacgctccacctgggctggcgtacatcgatgaactcgaagcacgcgaactgggcgacccaaagcgctacacgttcaaaaatgtgatccgaggaatcgaactggcccagcaaatgggcatccaaattcaccacgcagggaacagcgacagtggatggaaaatcaatggcgccgacacctaccctatgttgcgcgaaggtttcgacagccagttgcaaacactggactacctcaccaccgccattcctgtgcgcaccgatcgcgatttgggaatggatttgcgcacgcgcctgatgtcggcctatgccttcggcagccaagacgctggccacgcctgggaatcgatggtcaaacagcacggcaacgagtttgacgccatcgctcaagtgggtcacagcctgcgcacgggaggtggcgtgcttgcgcagcaatggccgccgggtgtggcaaatgccattcgagccgtgcgcaaggacaacggattgctgcggcccagggagttggagcccgccctttcgctataa

SEQ ID NO: 535524 - DNA, 222 bp, Stenotrophomonas maltophilia
atgccccaacatgaggatttattcgacaccagatttatgtttgacgaagatgcgattgccgacgacgacgtggagttcgcgcgctttttctttatcgaaaccaatcgcggcattgaaattcaacgcaacgaccgcagcgaaacaacgattgacgacgcattggcgctgctgcgcgacgccctggaaagcggcctcaccgttctggtgcggggtgcgcaatga

SEQ ID NO: 535525 - DNA, 450 bp, Stenotrophomonas maltophilia
atgatcacaaggattgcagcattgacgctgctcggtgcgcttagccttcgtgttggcgctgaggagcccgtcaacctcatttacaagtgcgtcaacaaggccggaacgcagtatcaaagccagccttgcgccaaaggcgagacggtccatattcgcttgtccgatcccgcgcctgtatcgccggaagcggcggccgccaatcagcgctatctggacgatctgcggcagcagaacgcggccgccattgcacctcggccagcgcctacgcggcctgtctacaacaatggcggtggcggcggccgcctgcatcacatttcccagtacaaagacccggacgcctgtgaggccgccaaggcggagcgcgctcgtgtctatgaggcggtgggccttcatcggtcgtttgaattgagccgccgcatggacgataaggtgtggtcggcctgcaagtag

SEQ ID NO: 535526 - DNA, 1092 bp, Stenotrophomonas maltophilia
atgatcaacggcacgctttacagcagcggcgtctgcgacaatggatgcaaggtgcagccgaaccttgatccgggcatcgatttctcgctacgtgagaattccaaccctaatgccatctcgattcgttctggcacttggaaggcgaatggcgaggtttgcagcgtggattctacgccgccgaagcctaaaaagaaggatgactattgccatcagacgggcaactacagcgtctgtaagtcgaaggatcgaacctgtatcagcacggccagcggttttcgcacttgcgcgagcgatacggccaatcagcagggccacaccgccacgaacaatccgcgcaccgaggccgcaagcatcagcgcgcctaacacgccgccgaacgcccccagcaatcgcccgggagagaattggcagcccagcggcaacaccacaaatatcaccaataacaacaccggcagcactaccaataccagcacatacaacaatcagggcacacccaacggcaaccagccgactccgggtgatggctccggccccggtgctggcggcagcaacggcaacggtgagaaaggcgaggatagcggcaacagcgccagtggcggcggggattgcaagacgcctccgaccaccagcggcgatcccatcctcggcatgatcgcgtcacagacctgggcaacgcgttgcgccaccgagaaggcgaattccgccaaggtcacgggcgatgttgggaactgtgaagcgcctttttctgttgagggtgattcgatacaggccaatcagcttcgcgcgcagcgcgcacagctgtgtagtggaaaacccggctccggcgagggtagtgggggcaatccacatgagggtgcggaagacgttgatggtccgggcaagtggtcttggaagtttgacgagaagctgatcgataagaccggctttggaggcggttcttgcccgcagctgggaacgcttgatttcggtcgtttcggcacggtgtctcttgatgggcagacgtggtggtgcccgctcatctctgcactgcgtactgtgatgctcttgctgggcatgttcatttccttccgcatcgtctttggggattcgtga

SEQ ID NO: 535527 - DNA, 195 bp, Stenotrophomonas maltophilia
atggccgctgagtgtttcgtcatcgccaaggcggattgggatcagctgatgcagctgttcgccggaatgttcctgctgctcgcgtgctgcgccgtgttctcgccactcgatctgcattcgtgggagtaccgcgtgcgccgctatctgcgtcgccgccgcattgcgcgtattcgggggggcgctcatggccgttga

SEQ ID NO: 535528 - DNA, 351 bp, Stenotrophomonas maltophilia
atgatcgatccactcgttaccttcgtgctgctggcggccattgcggccgtctccatcggtgctgctcgcatcgtgtcgtggctgctggaccggcgtgaccgtgccgccgtccagcgcgccaatgaagcggccatcgtcgtccaggcacgcgccgaactggccgccacgggctggaccgatcaggacgaatgcgcctaccgcgagcgtcgctgggattacgcctgtgatgcagagggcttcctgcacgttgatcaacttgatccgtgtgatgaggatgagttctacggcatcggcgactacgcagacgctccctttggtgccgccagtgaggccaattccaatggccgctga

SEQ ID NO: 535529 - DNA, 132 bp, Stenotrophomonas maltophilia
atgcggagccaacaaaagcgcagactcgacggatacgcaatttcgcataatgtatacaacgtgggcgttatcgaagcccggcacggccgcctgagccttgtggggcagggcgaaaccaacggccagacatag

SEQ ID NO: 535530 - DNA, 372 bp, Stenotrophomonas maltophilia
atgatcgagattgatccacacgaccgcacagatctgaccggcccatgggccggattcggcttccaaggcggccatatgttcacgcctgaaggtcaccagctggatccatgcgatatgacctggtggtcgttgacctgcaacatcgcccgggagtggcggctgatgatggccgaggctcgcacaggcttggccgaacgatcggttccggtctccaagggatccgccacggcgaaatccggcatgatctaccttgccgaagtcctcagaattcgccgagaacggcggctggccggatgtggaccggattccgacgccgagccctccaatgtggtctatctgagctgtgggccaaggccccgccagcgcgtgtga

SEQ ID NO: 535531 - DNA, 2304 bp, Stenotrophomonas maltophilia
gtgggcagcgcgctgatgctggtgggcgccaacagccgcaccgtggccgccgccgtcggcgacaagctcaaggagatcagcaagaccatgccgccgggcgtgagcatcgtcccgacgctggatcgctcgcagttggtggtggcgaccatcaagaccgtcgccaagaacctgacggagggcgcgctgctggtggtggtcatcctgttcgcgttgctgggtaactggcgtgcggcagtgattgctgcactggtaattccgttgtccctgctcatcaccgccatcggcatgaacaagctgggcatctccggcaacctgatgagcctgggagcgctggattttggactgatcatcgacggtgctgtgatcattgtcgaaaactcactgcgacgattggccgagcgtcagcatgccgaaggtagaatcctcactctgagcgagcgcctgcacgagaccatcgcgtcctccaaggagatggtccgcccgacgatctacggacaggcggtcatcttcctcgtctttgttccgtgcctgacgttccagggcgtggaaggcaagatgttctcgccgatggtgatcaccctgatgctggcgcttgcatcggcctttgtcctctcgctgacattcgttccggcgatggtcgcggtcatgttgaagggccacatctccgagaaggaagtgcgtgtagtggcggccacgaagagccgttaccagccgttgctgcgcaatgcgatccggcaaccgatgccatatcttgccggcggattgggcgtattgctggccggcgcggtggcgttctccttcgtcggacgtgagttcatgccgacactggacgagcagaacctgaacctgtcctccgttcgtattccctccacctccatcgaacagtcggtagccatcgatcttcccctggagaaggctgtgctgacgcttcccgaggtgcagaccgtctactccaaggcgggtacggcgagccttgccgcagaccccatgccgccaaacgcatcggacaactacgtcatcctgaaaccgaaggaccagtggcctgatggtgtgaagaccaaagagcaggtcatcgagcgcatccgcgagaagaccgcgttcctggtgggcaacaactacgacgccacgcagccgatcgagatgcgcttcaacgagctgatcggtggtgtgcgcagcgacgtggcggtgaagatctacggcgaagacctgacggccttggccaccagcgcagacaaaattgctgctgtgctgaagaagattcccggggcatcggatgtgcgtgtggcccagaccggtggcttcccgaccttcgacatggcgtttgatcgcgcagcgatcgcccgctatggcctgaccgttaaggatgtggctgatacggtgtcggccgcgttggccggacgccaggcgggccagatctttgagggcgatcgccgcttcgatgtggtggttcgactgccccgcgtcgaccgaagtgatctggacgtcctgggtgcggtgccggtcatgctgccgccggggaatcaggaaggcagcccttcggtgccgctgcgtgagctggtcagcttccgcttcacgcagggtctgaacgaggtgagtcgtgacaacggcaagcgccggatctatgtagaggccaacgtagtggggcgtgatctgggcagcttcgtggacgatgccaaggtagcgatcgcacagcaggtgcaactgccgaccggctcgtggatcgagtggggcgggcagttccagaacctgcaggcagctacccagcgtttggccatcatcgtgccgctgtgcttcatcctgattgccgcggtgctgtatatggccatcggcaacgggctgttgaccggcactgtgctgacggccgtaccgctggcgctggccggtggcttcttcgcgctggccttgcgtggcattccgttctcgatctcggcagcagtggggttcattgctgtttcgggtgtggcggtgctgaacggactggtgttgatctccgccatcaagaagcgtctgcatgacggcatggagccgaacgaggcggtggagcagggtgcaatggagcgcgtccggcccgtgttgatgacggccttggttgcttcactggggtttgtacccatggcgatcgcaaccggcacgggtgctgaagtccagaagccgttggcgaccgtggtcatcggcggcctcatcacggcaaccgtactgaccctgttcgtcctgccggcactgtgtgggctggtgctgcgcaggactgcgcgcaggaaggcagcgggcatcgaggacccactgccggcgccggaaaccgattga

SEQ ID NO: 535532 - DNA, 933 bp, Stenotrophomonas maltophilia
atgatcgaacaggtgcttacaggtgccgtgcggcaccgctggctggtgttgttcatcacgctggtgatctcggtcatcggtgcctggcagttgaacatgctgccgatcgatgtcaccccggacatcaccaacaagcaggtgcagatcaacaccgtcatccccacgctcagcccggtggaagtggaaaagcgggtgacctatcccatcgagaccgcgatggcgggcctgcgcggcgttgccaacacgcgttcgttctcgcgcaacggtttcagccaggtgacggtcatcttcgatgaaagtgccgatctgtacttcatgcgccagcaggtcaccgagcgcttgacccaggcccggccgcagcttcccgaaggcgccgagccgctgatggggccggtttccactggcctgggcgaggtattccactacagcgtcgagttcacacaccccgatggcaaggacgcgccacgcaacgatggcaagcccggatggcagagcgatggctcgttcctgaccgatcagggcgatcgcctggccgatgacatggcgcgcctagcgtacctgcgcacggtacaggactggatcgtgcgcccgcagctgcgcacgacgccgggcgtggctgacgtcgacagcctgggcggctatgtgaaggagtatgtggtcgagcccaatgcagccaagcttgctgagtatgggttctcctacaccgacctggcgaacgcgctgcaggatgcaaatctttcggtgggtgcggactacatccagcgctctggcgaatcctatctggtgcgagctgatgcccgtatccgttcggtggatgagatcgcgcgggccgtggtgggtaaccgcaacggtgttccggtcacggtgggtgatgttgcgcgggtggtgatcgacggcgagctgcggcgaggtgccgccagtcgcaacggctag

SEQ ID NO: 535533 - DNA, 309 bp, Stenotrophomonas maltophilia
atggatgccgcggccaagcccccatggaagggtttacggcgtctcccgcaaccggacccaccccgccatcccacggaatgcacgctgttgctgttgctgttgctgttgctgttgctgttgctgctgctgttgctgctgccggccagcggccggcactaccgcgggtgcagggctgcaagccctgccgcccccctactttgcctgctcgcagaatttctgccggtactcgagcgccttcggcatcagtgcctgcaggttctggatacgggtacccggattcggatgggtcgaggcgaactccggcggtga

SEQ ID NO: 535534 - DNA, 621 bp, Stenotrophomonas maltophilia
gtgtgcaataaccttcgcctccagggccagtacttcgatgaagagactgggctcaattacaaccgctaccggtactacgatccgaagctagggcagttcatcggccaggatcctttgaccttgcaggcgggtgagaacctgtacgactttgcgccatctgcagtcaactggatcgacgcgctggggctgagctgtgatgaggtgctcgacccaagagcgatgatcaacctacagcgccgccttgcgagcatggtcaatgaggttagagatgagttgttgaacaacccgaagctactgcaggatcagctcaggcgggcggaaatcgatgcgatcatcgacgagccttggcggatgcggctattctttggaaccgcgttgcagcgaagggtcaccgatcttgctcagggcgatagtgttctgtcggtcctaaggccaacgagaggcaacgcgccgcaggactattttgggcccggtggtctgggctatgaaatcactggtgggagcaagagttcgatcttcagtcacagtcagaggtccggtgtggacgctgttgttacttacgaatcgatacccgctgactttggatataaatgggttgattggagacttggtggtggatga

SEQ ID NO: 535535 - DNA, 852 bp, Stenotrophomonas maltophilia; identical to SEQ ID NO: 498401

SEQ ID NO: 535536 - DNA, 549 bp, Stenotrophomonas maltophilia
atggcgaagaccaagagcacgaccaaggccaagaccggcaagcagaagcttgcagcggcggcaccgtcggcgccgaacatcgatatcgggatcacccagggcgaccgcaagaagatcgccgacggtctgtcgcgcttccaggccgatgcgttcacgctctacctgaagacgcacaacttccactggaacgtgaccgggtcgatgttcaactcgctgcacaccatgttcgagacgcagtacaccgagcagtgggcggcactggacgacgtggccgagcgcatccgcgcgctgggcttcaatgccccgggctcctaccgggaattcgctgcgctgacctcgatcgccgaggaaccgggcctgaccgacagtgcggactggcgtgaaatggtacgccagttggtggtcgccaacgaagcggtctgccgtacggcacgtgaagtgctggaggtggcggccaagggtgacgacgcgccgaccgaggatctgatgacccagcgcctgcagacccacgagaagtacgcctggatgctgcgttccctgctccagtaa

SEQ ID NO: 535537 - DNA, 4083 bp, Stenotrophomonas maltophilia
atgaactctatcgataaaaatccgccgccccgcctgcgccaacagcgtgccgccatcgacggcgccatgagccgcgaccggggccgtttgctgggaatgctctcgcgttgccaggccaagccacaggatgcggcgctggccgccaccttcgagcaggccttgcaggcgtcggtgcagcgccggcaggtccgggcgcagcagcagccgtccattactctggacccgcagctgccgattgcgcgtgaagccgacgccatcatcgggctgatccgcgaccaccaggtcgtggtgatcgccggtgaaaccggctcgggcaagaccacccagctgccgaaactgtgcctggcggcaggccgtggccaggccggcatgatcggctgcacccagccgcgacggattgccgcgcgtgcggtggccagccgcgtggcgcaggaactgcagagcgaactgggccagctggtcggctaccaggtgcgtttcaacgacaaggtcagcgaagacagccgcatcaagttcatgaccgacggcatcctgctggcggaaatcgccagcgatcgctggttgtcgaactacgacacgatcatcgtcgacgaggcgcacgaacgcagcctcaacatcgacttcctgctgggctacctgaagcagctgctgcgcaagcgcccggacctgaagctgatcgtcacttcggccaccatcgacaccgaacgcttcgcccagcatttcgacaatgcgccggtgatcagcgtcgaaggacgtacctatccggtggaagtgcgttaccgcgcgctggaaggcgagggcgaagagcagggcgagcgcaccgtcaacgacgccatcgtgtcggccatcgacgagatcacccgcctggatgggcgcggcgacgtgctgatcttcctgccgggtgagcgcgagatccgcgatgcgcaccagtcgctggaacggcgcaagtaccgcaacaccgaggtgctgccactgtacgcgcgcctgtccaaccaggaccaggaccgggtgttcaatcccgggccgaaccggcgcatcgtgctggccaccaacgtggccgaaacttcgctgacggtgccgcgcatccgctacgtggtcgatccgggctttgcccgcgtcaagcgctacagcccgcgcaacaagctggaccgcctgcacatcgagccgatctcgcaggccagcgccaaccagcgcaagggccgctgcggccgtatcgccgagggcatctgctaccgcctgtatgccgaggccgatttccaggcgcggccggagttcaccgatccggaaatccgccgctccagcctggccggggtgatcctgcgcatgctgcagctgggcctgggccgcatcgaggagttcccgttcctggaagcgccggacgaacgcgcggtggccgatggctggcaacagctgaccgaactgggcgccatcgacgccgagcggcgtatgaccaccatcggcaagcagatggcacgcctgccggtggacgtgaagctggcgcgcatgctggtcgccgcgcaggccgccggctgcctgcggccgatgctggtgatcgcctcgttcctgggcatccaggacccgcgcgagcgcccgcccgaagcgcgtggcgcggccgacagcgcgcatgcgcagttcgccgatgggcggtccgaattcgtcggcgtgctgcgcctgtgggatgcctatcggcaggcccacgaagacctgacccaatccaagctgcgcgactggtgcggtcgccatttcctcggtttcctacgcatgcgcgaatggcgcgagctgcatcgacagctgcgcctgctgtgcgaagaactgggctggaaggaagaggccaacgaagcctcgatggcgccgttgctggctggcagcagtgcaccggctccggcgcgcgatgacgccgctgcagtgaaggccacccgtggccagctgcaccgtgccgcgcgcctggcccgcgaaggcaaggccgaagcggccccggcgccagtgcccgtgcgcgcgcagaaggaacaggcaccggttggcggcggtttcagcgaacgcgtgcgtgccgctgcgtaccagaccctgcatcgggcgcttgtggcgggcctgccgacgcagatcggccaccgcaccgagaagggcgatttccaggcgccacgccagcgccgcttcctgccgttcccgggttcggcgctgtccaagcggccgccgccgtggctgctggtggccaacctgctggatacgcagaaggtgtggggcatgaccctggcggcgatcgagccggactgggtgatcgccgaactgccgcacctgctgctgcgcaagcacttcgatccgcactggtcgcgcgcgcagggccaggtgctggcctccgagcagatcagcctgttcggcctggtgctggcgccgaagaagccggtgcactacggtcgcatcgcgccgggcgaagcgcacgacatcttcgtgcgccaggcactggtgaccggtgagatcaacacccgcgccagcttcgtggccgacaaccagaaagtgctggagatcgcccgcgaggaagaagccaagctgcgccgtgctggcatcgttgccgacgaggactggcaggcgcgctggtacctggaccgggtgccgccgcagatccattcggcggcggggctggacacctggtggaaggggctggcgccggaacagcgcaagaccctgcactggtccctggtcgatctgttgccgggtgagggcagcgaacaggagcgctatccgaagtacctgccgctgggccaggcgcgcctgccactgcattaccgcttcgagccgggagccgacgacgacggcgtcaccctggacgtgccgctgcatctgctcaacgcgctggacccggtgcaactgggctggctggcgccgggtttcgtcgccgacaaggcctcggcactgatccgcagcctgcccaaggcgatgcgccgcaactacgtgccggcaccggacttcggtcgcgcgttctacgaggcgttcccgcagcccagcgccgatgccatcaccggcgagctggcgcgcttcctgtcacgtgcgaccggcgcaacggtgacggcgctcgatttcgagcccggctcgatcgagccgcacctgcacatgaacctgcggctgcgcgacgagcagggcaaggtgctggcgacctcgcgtgatctggacacgctgcgcgcgaagttcggtggtcgtgccggcgatgccttcgctgcacgcgccggccgcgagatggccgccgatggcctgcgtacgttcccggccacgccgattcctctgcaggtacccggtgaagcgggcgtgccggcctatccggcgttgctggacgagggcgacagcgtggcgctgcgcatcttcgccgatcgccagcaggcgctggaggcccatccgctgggcgtgcgccgtctgctggagattgccctggccgagaaggtgaagcaggcacgcaagcagctgccggtcggtgccaagaccggcctgttgtatgcggcgatcgagtcgcaggaacgcctgcgtggtgacctggtcgatgcggcgatgaacgcggtgctggccgaggggctggaagacatccgcgatggggcagccttcgagcagcgtcgtgagcatgcggccaaggcgctgtttggcgaggccatgtcgcggctgaagctggccgaaaccatcctggcgctggtggcggaactgaagccgatgctggaagcaccgttgatgggctgggcacgcggcaatctggacgacatggaagcgcagctggtcgggctgatccatcccggcttcctgcgcgacacgccggccgacgcgttggcgcagtacccgcgctatctgaaggcgatgatcctgcgcaccgagcgtgccaagcgtgatccgccacgtgaccaggcacgcatgctggaactgcatccgttcctggaggcgttggcagcgggggagcagcagggactgcgcgaacgcccgcaatggcaggccctgcgctgggacctggaagagctgcgggtatcgctgttcgcgcaggagctgggtgcacgcaccggcatctcggcgaagaagctggcgcagcgggtgaccgcactgcgccaggcgtga

SEQ ID NO: 535538 - DNA, 537 bp, Stenotrophomonas maltophilia; identical to SEQ ID NO: 514668

SEQ ID NO: 535539 - DNA, 2157 bp, Stenotrophomonas maltophilia
gtgaaccgcgcttccgtccccggcctggatgccttgttgaaccgtccctcggcagcggtgctgcccgctccgctgcgccaggccctgcgcgagcattgggaagcgccggagtgcgaccaccagatgcgcgccagctggtcggtgctgggcgacaccctcgacgcactggcgatgctctcggccgacgaaggcgcggtggtcgcggccctgctgttcgatctgcccggcctgcgcgccagcctggagcaactgccgctgggcaaccacaaggccgcggtgatcggcctgctggatggccaggatgcggccgatccggtgtgggcgctgcacgccggccgcgaggccgggcgcaacagcgaaggcctgcgccgcctgctgctggcgatcatccgcgacctgcgcgtggtgccgatcctgctggcccggcagctggcccggatgcgcgcggccgacaagctggacgatgagcagcgtcgcgcgctggcgcagctgacccgtgacatccatgcaccgctggccaatcgattgggcatctggcagctgaagtgggagctggaggacctggcgttccgccacctggaaccggagacataccggcgcattgcgcgggaggtggacgaaacccgcatcgcccgcgagcgttacgtcgagaacgtcaagaaggtgctgtcgcgcgaactggtcgcgcagggcatcaaggccgaggtcagtggccgcccgaagcacatctacagcatctggcggaagatgcagaagaagcggctggcgttcgaccagctgtacgacatccgcgcggtgcgggtgatggtcgatgatgtcgccgcctgctacgccgcgctgggcgtggtgcacgcgctgtgggcgccggtgccgagcgagttcgacgattacatcgcccggcccaaggccaacgactaccgttcgctgcataccgccgtggtcggtccggaaggccgcaccatcgaagtgcagatccgtacccacgagatgcattcgcaggccgagctgggcgtggccgcgcactggaagtacaaggaaggcggcaagggcgcggaaaagtccttcgaccgcaagatcacctggatgcgccaactgctggagcaggcgcaggatgggcagggcaatgaactggccggggcgctcgatgccgagctgaccgaggaccgggtctatgcactgagcccgaaggacgaggtgctggacctgccgcagggggccacgccgctcgatttcgcctaccaggtgcacacgatggtgggccaccgttgccgtggtgcgaaggtcaatggccgtatcgtgccgctgacctaccgcctgcgcagcggcgaccgcgtcgagatcctgactggcaaggaggccgacccgcgtcgcgactggctgatgccggccaacggcttcctggccagcaaccgctcgcgcgaaaaggtgcgcagctggttccacaagctggatcgcgcgcgcaacgtgcaggctggccgcgaactgcttgagcgcgaactgaagcggctgggcctgcagcattcggacctgtcggtggcggcgaagaagttccatgccgacagcgtcgacgatctctacatccaggtggcgctgggtgataccggcccgaaccaggtcagccgtaccctgctggaggcggagcgtgcggccagtcagccggcacctgcgccgagcctgccacgcccgaccgcgcgccgcgagaacctgggcaagtccaagttcaccgtgcagggcgtgggcaacctgctggtacagctggcgcgttgctgccagccggtggccggcgaaccgatcgtcggctacctgacccgtagccggggtgtcaccgtacatcgtgcagactgtgctgcgctggcccggctggcagccaccagcccgcagcgcatcctgccggtggagtggggccaggccggcggtggctacgaggtggacgtggtggtcactgcagtcgaccgccgctggctgctgaaggacatcaccaacctgatcgcccaggaagacgcctacgtgctcgacatccacagtgacaacgtgcgcaacagtggccgtgcccatctgcgcctgcgcctgaaggtgagcgactacggccagctgtcgaccctgctgggcaagctggatgcgctgcccggcgtgagcgaggcgcgtcgcctcggctga

SEQ ID NO: 535540 - DNA, 1566 bp, Stenotrophomonas maltophilia
atggaacgcgagcctccgcatcgcccgcatggcgctgaacatcctgcgctggaccgcgtccgccgcgaaggccgttggtggtggctgcaggcccgccacgcgcgccgggtgtggcgctgggcgctggtcgcagcgctggcggtgttcgtgctgctggtgctgctgcgcaagccgttggctgactggttctgggatgaaccgcagatcgaacagctgctggtcgagggcgatcgtgcgcttgccagcggccgactgagcgcggccgacggcagtggcgcacgcgaacgctaccaggccgtgctggcattggatggcgaccgtccgcaggcccgtgaaggcctggcacgaacggccgctgccgccctgcagcaggcccgcgacaaacttgagaacaatgatctcgacggcagtgcgcaggcgctggcactggcccgcgaactgcaggtgccgcagggcgatgcagatcctgtcgcccgccagttgcaggcacggcgcagtgccggggcgggcatcggtgcgctgctggcgcaggcccgcaatgccctcgctgccgggcggctcgacgatggcgacagcagcgcactgccgctgttccagcgcatcctggcactgcagccagacaacctgccggcgctggaagggcgcgaagatgcactgagcgatctgctgcagcatgcgcgtgcgctggccgggcgcggggacctggccgaagccgctgcgatcgtgcagcgcgcgcgccagttcgatgccggccacgccgatctgcccgccagccaggaagcgttggcgcgggcggtcgatcagcgcctgaggcaggcccaacgtgcattgcagcggcggcagctggacgtggcggccaaggggttcctggcggttcttgcggtggcggccgatgatcccaatgcccagcgtggccgcgaacaggcgttgcaggccgtactggcacgcagccagaagcaggccgacgacttccagttcgaggcggcgcaggcggatgcagcgctggcggaagaactgggcgcctcgccggccgcacgacagcagctcgcacagcgtctgcagcgcgcacaccaggcgcagaaggcgctgcagcagccgtcggtcagcaacacgcagcgcgagcgccaactgcgcgaccacctgcgcaggatcgagcgcgccgaacgcgctgggcagtggatcagtccgcccggccacagtgcgttcgacgcgttgcgcgaagcgcagtcactggcgccacgcgatgcacgggtgaaggccgctgcagcccgcctgttgccggccagccgaagttgtttcgacgacaacctgcggcagaatcgcgtgcaggcggccggtgcctgcctgcaggcgtggcagaccctgtcgccgaccgcggctggacttccctcggcacgcctgcgcctggcccagcgctggctggcgatcggcagcgaacggctcggcaatggagacctggcgtttgccgcacacgccgccgaacaggcccggttgctgcaatcggacctggccgagctgccggcgttcgaagaccgcctgcgccgcgccggcggtcgcccggattag

SEQ ID NO: 535541 - DNA, 2100 bp, Stenotrophomonas maltophilia
atggcgatgtccctggccgagatccgatacctgatcaaccgcctgtcgggcctggcccgccggagcctggccagcctgcgtacccgtgggtggcgggcgacctggcagcgcatccgcgtgcacacccagcgcgccgtccccgccccacgcactccattgttcctgccaccggaacaagcgttcgcccccttcacggtgccgttcagtgaaacgccggaagtgagcatcgtcatcccggtctacaaccacgtcggccacaccctggcctgcctgcgcgccctggcagcgcacccgccggcggcggcctgcgagatcctggtggtggatgacggcagcagtgataccaccccgcagtggatgccacaggtggccggactgcgctatgaggtacgtgagcgcaatggcggcttcatcgaagcctgcaatgacggcgtcgcacgcgcacgcggccgcttcgtggtgctgctcaacaacgatacggtgccgcaaccgggctggctggatgcactgctggacacgttcgccaatacccccgaggccgggctggtcggcagccaactgctgtacccggatggccgactgcaggaatcggggggcgtgatcttcgccgacggcagcggctggagctacggccgcttcgaggccgccgacgacccgcgctttgccagcctgcgtgacgtcgactactgctccggcgcggcgctgatgctgccgcgcgccctctggcagcagctgggcggcttcgatacccgttacaagccggcgtactacgaggacaccgatctggctttccgcgttcgcgcccagggcctgcgagtgctggtgcagccggccagccgcgtggtccacgatgaaggcaccagcaacggcaccgataccggcagcggggtgaaggcctaccaggtgcgcaaccaggccatctttgcgaccaagtgggcggccgagctggcccaccatcctgcagtgggtgcggtgccgtcgcctgcgctgctgcagcgcggccgccgccaggtgctgatcctcgatgaggaagtcccgaggcccgatcgcgattccgcctcgctgcgccaggtcaacctgatccgcctgctgctgcagggcggcgctcacgtggtgttcgtccccacccgccgcgaacacggcggcgctgccaccgaggcgctgcagcggatgggcgtggaagtctggtacgcgccgttcattgatggcgtggccggctggctgcgcacgcacggtgcgcgcttcgacgtggcgctgctggtccgccatcatgttgcccacgagtgcctgccgctgctgaagcgctatgccccgcaggcacgcacggtattcgacaccgtggacctgcactacctgcgcgaacgccgcggtgccgaagtcgccggcgacaccagcctgctacgggccgccgagcgcacccgtaccagcgaactggcggtgatggagcagtgcgacatcaccgtgctggtcagtgccgccgagcgcgagcagctgcaggccgacgcacccgccgtgcaggtggaactgatctccaacctgcatgacctcgccggtgccggcaagccgttcgaacagcgccatgacctggtgttcgtcggtggcttccgccatccgccgaacctggatgccatggagtggttcatcggcgaagtctttgccggcatccgcgcccgtctgcccgaggtacgcctgcactgcatcggtgccgccacgccggaatcgctgctggcgttggccgctcgccagccgggcgtgcagatgcatggcttcgtcgaggacatcacgccttacatggacggtgcccgcatttccatcgcgccactgcgcttcggcgccggcgtgaagggcaagatcaacctgagcatggcccatggccagccagtggtcggtaccacctgcgccgtggaagggatgcacctgcacccgggccaggacgtactggtggccgatgatgcggcgggcttcgccgatgcggtggtccgcctgtaccaggatccgcagctgtggcagcagttgtccgacgccggcctggccaacatcgcagagcacttctccctcgacgctgcccgcgcgaccgtgcagcgggtgttcttcacctaa

SEQ ID NO: 535542 - DNA, 2442 bp, Stenotrophomonas maltophilia
gtgccccgacgctacgattccgacgacatcgacgatttcgacgacgacgaccagcaggacaacggcccgctgtggcggcgccggctgatcacctggagcatggctgcggtcgcgttgggattgggtttcctgatcccctatacgctgtacctgaaccagcaggtcacccaacgcttcggtgaactgcgctggcagatcccgacccgtgtgtacgcgcgtccgctggtgctcacgcccggcaaggcaatggatgcggcgaccctgaagaccgagctggccgcttctgcctaccgcgatgacggccagggcaaggagccagccacctatgcggtgaacggcgggcgtttcgtcatttccagccgcggctacaacgatgtcgacggccgggtcgccccgcgccggctggaactgtcgttgtccgacggtgcggtcgcgtcgctgcgtgatgccgacaaccgcaaggcgctgaaggccgcacggctggacccggcgcgcatcgccaccctgtacgggcagaagcaggaagaacgccgcctgatccgcatggatgaggcgccggacctgctggtgaccggcctgcaggcggtggaggacaaggacttcaaccgccaccacggcatcgacctgtccggcatcgcccgtgcggtgtgggtgaccatccgctccggtggccagagccgccagggtgcctctacgctgacccagcagctggcccgcagcggcctgctcggcatcggcaaggagcagacggtcacccgcaagttcaacgaagtgctctacgcgctgatcatggaagcgcgctacgacaagcgcaccatcttcgaggcctacctcaaccaggtgtacctgggccagcgcggcagccaggcgatccatggcatgtcctccggtgccgaattctggttcggccgcgacctgtcgtcgctggaaaccgagcagatcgcgctgctgatcggcctggtcaaaggcccgtccttctatgatccgcggcgcaacccggagcgtgcgctggaccgccgcaacttcgtgctgggcaagctgcacgaggccacgctgatcgacgacgccgagtaccaacgtgcgctgaaagcgccgctgggggtgcccaagacccccggcctggttgcggccaaccgcttcccggcctacgtcgatctggttcgccgccagctcggccatgattatccggaatcggcactgcagggggccggcctgagcgtgatgaccggcatgtcgccgtccgcgcaggcctatgccgaaggtgcggtgacccgcaccatcaagtcgctggaaagcaagcgtcgccccgaactgcaggccggcatggtgctgaccgacgtgcacaacggcgacgtgctggccgtgatcggcagccgtgaagtgtccgaggtcggtttcaaccgtgcgatcgaggcacagcgcccggtcggttcgctgctgaagccgttcgtgtacctgctggcgctggcacagccggaccgctattcgctggccagctgggttgacgattcaccggtgaccgtccagctcggccgtggccgcaactggaccccgggcaacgcggacaaccgcagccatggcaccgtgcgcctgatcgacgcgctggcgcattcctacaaccaggccacggtgcgcgtgggcatgcaggtcggccccgaacgcgtgacccagctgatccacgtgctggccggcatcaaggccgaggcgaatccggcggtgatcctcggctcgaccgaccagagcccgtacgcgatggcgcagctgtaccagttcctcgcgtccggcggtgagatccagccgctgcacgcggtgcgtggggtgctcgacccgcagggcaaactgctcaagcggtatgacaagactccggcaccggcccaggaaggtgactcgatcgccgccaacctgatcagcgtcggcctgcagcaggtggtcgccagcggtaccgcgcagcgcctgaatgccgatggcctgggccgcctgcagccggccggcaagaccggcaccaccaacgacggccgtgacagctggtatgccggctataccggtgatcatctggcggtgatctggatcggcaacgaccagaacgagcaggccggcctgtacggcgccaccggtgcgatgcgggtgtggtcgggtatcttccagcgcctgccgagtgccccgctgcgggtcagcaacaagggcctggactggcagtcggtggcacccaccggtctcaacacgaccgatgaaggctgtccgggtgcccgccgcttcccgttcgtggtcggctacgctccggcgtatgcaccgtgcgcaccggcgacgtcgccggatgggcagggcggtgccgaaggcgaaggcggtggctggcgtagctggttcggactggaccgcaagccggaagcgcctgccgaacctgccgcggcacctgccgcagcctctcctcctccgagccgatga

SEQ ID NO: 535543 - DNA, 534 bp, Stenotrophomonas maltophilia
atgtcgatgaacatgcgatccctgttgcagcccctggccttgaccggccttagtctggccctggccgcctgcgtgagcagcgcaccgccggtggtcaagccggtcgataccaccacgccggcgcagcgtctggccgccgtgaacgcagctgcgggtccggacgacaaggagctgtcggtgcagccgctgcgtgattcgcaggtggaagatctgcgggtgaccgcgcaggcgcagcgccaggccaacgatctggccggtgccgccagcagcctggaccatgcgctggagatcgtggcgggtgacccggcggtgctgcaggagcgcgccgagctggcgctgctgcagggccagtgggcgcaggcggagacgttcgcgcgcaaggcgatcgacctgggttcgaagacggggccgctgtgccgccgacactgggcgacgatcgagcagtcgcgcctggcgcggggcgagaaggaaaatgcggtgtcggcgcatgcgcagattgaaggttgcacggtgccggggatcaagcggtactga

SEQ ID NO: 535544 - DNA, 912 bp, Stenotrophomonas maltophilia
atggaaaccgtccgcatcgccacccgcaagagcccgctcgccctctggcagagcgaacacgtcgccgaccgcctgcgccaggcccatcccggcctgcatgtggaactggtgccgatgagcacccgcggcgacgaggtgctggaccgctcgctggccgccatcggtggcaagggcctgttcctgaaggagctggagttggccatgctgcgtggcgaggccgactgcgccgtgcactcgctgaaggatgtgccgatggagctggacgcaccgttcgcgttgccggcaatgctgacccgccacgatccggccgatggcttcgtctccaacctgtacgcctcgctggacgcgctgccgatcggtgcgcgggtcggtacctcgtcgctgcgccgccaagcccagctgcgcgcgctgcgcccggatctggaactgctggacctgcgtggcaacgtcaacacccgcttggccaaactcgacaacggtggctacgacgccatcgtgctggccgtggccggcctggagcgtctgggcctgggcgagcgcatcgtcgcgcgcctgcaaccgccgcagtggctgccggctccggcgcagggcgcggtggcggtggagtgcgatggtggcaacgcgcgcttgatggcgctgttcgccggcctggatgacgcggaaacccgtgcctgcgtggaagccgagcgggcgatgaaccgtgcgttgcatggcagctgccacgtgccggtggcggcgatcgcgcagtggcagggcaccgacctgcacctgcagggcctggtcggtagtgccagtgatggtcgtgcggtgcgtgccgaggccgtagggccggccagcgacccggaagcactgggccagcgcgtggcgacgatgctgctggatgccggtgccggcgagctgctgaacgtctga

SEQ ID NO: 535545 - DNA, 777 bp, Stenotrophomonas maltophilia
atgtccctgcgcgtgtccctgctgatccccctgctgctgtgcgcgcctctcgcgtatgcgcaggatgcctccgagctggcggcgatgtcctcgccgtggagcggcagtggcggcgagctcggtttcgcctcggcacgtggcaacagcagcaccgagagcttcaacggccgcctgcgcctgcgctacaccgatggcgactgggtgcacagcatggacctgttcggcctgcgctccagctccaaggtgaccgagaccaacgacgacggcaccaccacccgccgcaacaacaccaccgccaaccgctacaccggcagtgccggcagcgcgctgcagctgggcgagcaccgccagctgaccgcgacggtacgtaccgaacgcgatgacttcgccacctacgaccgccagagttcgttcggtctgggttacggcacccgcctgtggaacaccgagcgcttctcgttcgacgcgcagatcggccccggtgtgcgtcgtacccacagcaccgaggacgaccgcacccgtaccggcatgatcggccgcggcctgttcgacatgaagtactcgctgaccgacaacaccgacctggtcaacacgctgctggtcgaatccggttcgtacaacaccttcggccagaacgacttcggcgtttcggtgagcatgaacgagcacctggcgctgaaggccggctggcaggcgcgttacaacagtgacgtggccgaggacaagcgcaagaccgatacgctgaccacgatgaacgtggtctacaagttcaagtaa

SEQ ID NO: 535546 - DNA, 603 bp, Stenotrophomonas maltophilia
atgcgccggttgcctgccctgtccctgctggcctgcctgctgctggccgcctgcgatcgcacaccggcacccgccagtaccgaagccccggtaccggccgcggacccggcgcaggcggtcctgggcgccagccagcgcttcgcagccctgcgcagcttccacgccgagctggaggtgctgggcgcgccacagccggtgcgcagcgccatggacttcgtcgcccccgatcgtttccgggtgcagacaccggccgggccgcagaccatcatcggtgacaccatgttcctgcaggccgacggtgcggtccgccaggtgccaaccccgccgggcctgctcgagcagtggcgcaacccgttgccggccgacgccctgcccgccgacctgcaggccgaggatctgggcagccagtcgctggatggggtcgaaacccgtcactatcggctgcgcggcgcccagcccggcgaacgcctggaatactgggtggatgcgcagggcctgccgcggcagatcgtgcgcagcggcagcagcaatggccgcagtttccagctgcgcctgcgctattcgcgcttcaacgacccggcattgcgcgtcgatctgccctga

SEQ ID NO: 535547 - DNA, 972 bp, Stenotrophomonas maltophilia
atggaccgatacgaacgcatcaccgccctgcatcgtctgctcaagtccgcgcgctatccggtgacggtggcgaccctgcaggacaagctcggttgttcccgcgccaccgtctaccgcgacctggccttcctgcgcgatgcgctgatggcaccgatcgagggcgacggcgaggcgggcttccgctaccaggctgacgagagcgaccgcttcgagctgcccggcctgtggctgagttcggaggaactacatgccctgctggcctcgcagcacctgctggcgcggaccggcggcggcgtgctgtcgtcggtgctggcaccgctgcagcagcgcatcgagagcctgctggcggcccaggccggcgtctccagctggccggtcgaccgcgtgcgggtgattccgcaccgtggccgcaagttcgacgaaggcagcttccgcagcgtcgcctccgccgtgcttgagcgccgccagctggcgttcgagtaccgtgcgcgttccaccgatgagccgacccggcgcacggtctcgccgcagcgcctgacccactaccgcgacaactggtacctggatgcctgggaccatgaccgcgaggccctgcgcagctttgccgtggatcgcatccacaaggcgcgggtgatcgacagtaccgcccgtgacgtggccgacagcgagctggacgagcagctgggcgccagctacggcatcttctccggtgcgccgaagggctgggcgaccatcctgttcagcgccaaggccgcgcgctgggtggccgacgagcactggcattccaagcagcagggccgcttcctggccgatggccgctatgaactgaaggtgccgtacagcgtctcgcgcgagctgctgatggacgtgctgcactacggctcggatgccgagatcgtcgagccggtgatgctgcgtgagcaggccaaggcgctgctcgagctcgccctgagcaactacgacaactcctga

SEQ ID NO: 535548 - DNA, 795 bp, Stenotrophomonas maltophilia
atgaaaaagaccctgttgctgcccctgctcgccgctgcgctggccctgaccgcctgcggcaagtccggcgagccctcgcagaagctggtggtggccgccacggccgtgccgcatgccgagatcctcgaggtggtcaagccgatcctcaagcaggaaggcgtggacctggacgtgcgcgtgttcaacgactacgtgcagcccaacgaccagctggtgcagaagcaggtggacgccaactacttccagaccgagccgtacctggatgcctacaaccgcgaccgcaagaccgacctggtgaaggtgatcggcgtgcacatcgagccgttcggtgcgtactcgcgcaagatcaagtcgctggccgaactgcgcgaaggcgccgacgtggtgatcccgaacgacccgagcaacaacagccgcgcgctgatcctgttgcacaaggccggtgtgatcgagctgaaggatccgaccaacgcgctgtcgacccagcgcgacatcactgccagcccgaagaacctgaagttccgcgagctggactcggcgatgctgccgcgcgtgctggaccaggtcgacctggccctgatcaacaccaactatgcgctggacgctggcctcaacccgaccaaggacgcactggcgatcgaaagcaaggattcgccgtacgtgaacttcctggtcgcgcgcccggacaacaaggacgacgcccgcgtgcagaagctggccaaggccctgaccagcccgcaggtgaaggccttcatcgagaccaagtacaagggcgcggtgctgccggcgttctga

SEQ ID NO: 535549 - DNA, 828 bp, Stenotrophomonas maltophilia
ttgcgccaccaccgggtcggccgggtcgagctggctggtcaatgcactggagtacagctgctcgcggtgcagctggaaggtgcccagcaccgccgagccggccaggccacccagcgtctgtgtgatcgacagcgtcaccaggaaggtgatcatgtggtccacgccctgtttcagcgcggcggaaatgccgagcatgatcaacgggcccatgaacatgccggcacccaccgaggccaggaactggctgacgtagaagtcgtgcggccgatccatgctggtgcggtgctgatcgaagacggcggcagcgccgagcagcaggatcgccatcagcagctgggcgatcagccgcttcgggccgaacgtcagcgaggcaccggcgatgccggtgaccacgcccgcgaggatcactacgaacagcgggcgcatctggtccgggcccatgcccagcgtgcgcatcaggttgaccacgccataggactgctcggtggtcaggaagcggatcaggaacgcgccgacgatgaagtgcagcaccggcagcttcgacagccagcggatctgcagcagcggattgcgccggtagtgttcgatgatgaaggcggtggtggagagcacgatcgaggcgaccagcgcccagcccagccacggtgtgttgagccaccagcgcgtgtagccctgcgccagtacgatcaccagcagcgcgacagccggcgcaagcagggcgaaggtgaggaagtccagtggctcgaaggctttcacctggatgccgggcggcagcttcagcaccaccactgccgcgaacgcgcacagtgccagcccggcttcgaatga

SEQ ID NO: 535550 - DNA, 270 bp, Stenotrophomonas maltophilia
atgagcaacgcactacccaccatccgccgccgacgtgaatacaccgcccccgagattgccaaggcgttgggcgtgagcgtgcgcacggtgcgccgtcgcgttgcggaaagccgagcggactacgagcagcgcgccgccgagcggcgtgcgttcgtggccgagcagcgggcgcagggcgtgccgctggctgatattgcgcagcgcatgggaacaaccgtggatgcggtcaagagcctgcacaagcaggctcgcaaggaggcgaccgggtga

SEQ ID NO: 535551 - DNA, 849 bp, Stenotrophomonas maltophilia
atgaggccacactatcaacaagacctgtttctagcaagtgctccaaagcgcccattttgcgccgatgacctcggcaccgggctgcgcattcgcagccaagaacaggcactgagccaccgctacattcagcacaacccaccgcacgcactggcgtttttggtgttcgatttcgaccgctccggggcgctggttgctgccgatgatgcggggttgccgctgccatcgtgggttgctgaaaacagggacacacggcgcggtcatctggcctatgcgctggcgtgtccagtcatcaccacggacgccgcacgctctgcccccatgcgttacgccgccgcagtggagcaggcctatcgtgacgcgttgcaggcggacagcggttattccaacttcatcaccaaaacaccaggtcatcaggactgggaaacccggtggggtagggcagacgcctacacgctggaagagttggccgaatacctgcccaacggcttgccgtcgctgcgcaagcggcgagaggaagccagtggcctaggtcgcaacgtgtcgttgttcgaggggttgcggtcgtgggcctaccgcgcacgcaaacagttcgatgacgtgggggaatggcatagagaaaccctaacaagggcaaaggtgttgaacggtgactttgcccagccgttaccggcaagcgaagtgcgggcaacggccaagagcgtagccaagtgggtgtggacccggttgggtcacggtccagcgggtgaggcgttctttgcccggcagacacggaaaggccaactgtcaggcatatcgcgtcagtcgaacgcgatggacaccgcacaacgcattttggagttccgcaaatga

SEQ ID NO: 535552 - DNA, 1488 bp, Stenotrophomonas maltophilia
gtgaacatcatccagcgcattgccgcatttgctcgtgtccccttgtcgggctctttcgtgaccgacaagggggggagtgattcgcaggcacatcgggagatgggccgtaaagcgaagcacgggggcaccgcccccacgccccagagcgacagcggcggggcggtggagcgtggcgggagccgcgctcctgtggctcggacgcagccacaaggcgacgggcaagcgaagcgcgccacgttgccgatgtggttgcgggagagacacacggcggagaccaaggcgcgccatcggcgtgccctggacgaagccgagcggacgggcaaacctgtgggtctgctgctcgaccagcagaccaaacaggttttggcggacgcaaagcgcggcaacatcagcgccgcgacgatggcgaaatatcgccgagacgtggagttgatgagggagcgcggccagacaccagccgacgccgcgaacagtgccaaacactggtcacggctgcgggctgcgtggctggctgtggaagtggcggccatccagcaagcacgggccagcgcggaaaagtaccgtaaggcgggggatctcaataccgcccagaagcgcacccgcgaagcgtgggagcgctccctaatccttgatgcgatgttccttcagccgagtgcgccgcgctggtctgatcgccgcgcagcgatgaaagcagcggggcagaagcctgcgcgcaaatcaaagcgatttggaccccaagcgccgacccctgaagcgttgttggtcaacatggggaaggtgcggggtgcgttgaaccgtcacgacaaacgcgcggccatgctggcgctgttcggcatgcgcccggaagagatgcgcaaaggcgtatcgctgaccgtcagcggcgggctgctgaaagccaaaatcaagggcgcaaaggtcgacggtcagcgcggtcattgcgtgcggttctgtgccgtgcctgcgaagaagttggggccgatggatggcgctgtggcggcatggctggcgcagtgcgtcacggacgccggcggcacgctgaaaatcgacacgtcggacgcggacattcagagcctcaacaatgcgctaaaccgcatggaaaaaggcctttcgtgctattcgttccgtcacgcaatcgggtcgaacttgaaggcagcagcccaagccggtgaggtgacacaagaggacgcagccgcgttcatgggtcaccgttcggaaaagtcgttgtcgtattacggccgggccactcaagggcgcaagggacggcgctacaaagcggtggtggcgaaggacatcgagccaccgataaaagccaatgtgaccagagccgcaaaggcaaaggcaaaagcggctaaagcggaggtggtgcggttcccgcccaagccgcagcggccagaggccgcgcccaaggcggcccggcaacatgcgcccaggacaacgctggccaagtctcacccgctggccggtgggccacgtccaccgcggatgtga

SEQ ID NO: 535553 - DNA, 318 bp, Stenotrophomonas maltophilia
atgggttggatatatctcattctcgctggcgtctttgaagttggttggccagtcgggctcaagatggcgcagacaccggagactcgctggagcggcatcggagtggcggttgcatttatgactgtgagtgggtttttactctggcttgcgcagcggcagatccccattggcaccgcatacgcggtgtggacaggcattggtgctgccggcacctttttcgtaggcgtgctgtactacggcgatccgacttcgttctttcggtacatgggcgtcgccctgataatagcgggcgttattaccctcaagttggctcattag

SEQ ID NO: 535554 - DNA, 825 bp, Stenotrophomonas maltophilia
atgagcaattacgtcaccgtcgccgatggcgcccgcatcttctacaaggattggggcaccggccagccggtcgtgttcgcccacggctggccgctgtcgtccgatgcctgggacccgcagatgctgttcatgggccagaacggcttccgcgtgatcgcccacgaccgtcgcagccacggccgttcgagccagacctgggatggcaacaacatggacacctacgccgatgacctggccgcggtgatcgaggcgctggacctgaaggacgcgatcctggtcggccattccaccggcggcggcgaagtggcccactacatcggccgccacggcagcacgcgcgtgtcaaaagtggtgctggtcggcgccgtgccgccgctgatgctgaaaaccgacgccaatccggccggtaccccgctggacgtcttcgacggcatccgcaagggcacgggcggtgaccgctcgcagttcttcaaggacctgaccacaccgttcttcggtgccaaccgcgatggcaataccgttacccagggcatgcgtgattcgttctggctgcagggcatgctcggcggcgtcaagggccagtacgactgcgtgcacgaattctcggaagtggactacaccgaggacctgaagaagatcgacgtgccggcgctggtggtacacggcgatgacgaccagatcgtcccgttcgatgcctcggcgaagctgtcctcgcagatcatcagggatgccaagctgaaggtgtacgccggtgcgccgcatggcctgaccgtcacccacgccgaccagttcaacgccgacctgctcgcgttcgcgcgcagctga

SEQ ID NO: 535555 - DNA, 516 bp, Stenotrophomonas maltophilia; identical to SEQ ID NO: 510575

SEQ ID NO: 535556 - DNA, 336 bp, Stenotrophomonas maltophilia; identical to SEQ ID NO: 510576

SEQ ID NO: 535557 - DNA, 270 bp, Stenotrophomonas maltophilia; identical to SEQ ID NO: 511587

SEQ ID NO: 535558 - DNA, 792 bp, Stenotrophomonas maltophilia; identical to SEQ ID NO: 510577

SEQ ID NO: 535559 - DNA, 2250 bp, Stenotrophomonas maltophilia; identical to SEQ ID NO: 511589

SEQ ID NO: 535560 - DNA, 1131 bp, Stenotrophomonas maltophilia; identical to SEQ ID NO: 511590

SEQ ID NO: 535561 - DNA, 744 bp, Stenotrophomonas maltophilia; identical to SEQ ID NO: 510579

SEQ ID NO: 535562 - DNA, 381 bp, Stenotrophomonas maltophilia; identical to SEQ ID NO: 511595

SEQ ID NO: 535563 - DNA, 606 bp, Stenotrophomonas maltophilia; identical to SEQ ID NO: 511596

SEQ ID NO: 535564 - DNA, 741 bp, Stenotrophomonas maltophilia; identical to SEQ ID NO: 510581

SEQ ID NO: 535565 - DNA, 1017 bp, Stenotrophomonas maltophilia; identical to SEQ ID NO: 510582

SEQ ID NO: 535566 - DNA, 783 bp, Stenotrophomonas maltophilia; identical to SEQ ID NO: 510583

SEQ ID NO: 535567 - DNA, 1992 bp, Stenotrophomonas maltophilia
atgagcatggacctgcaacgcttccacgccaccttcttcgaggagagccgcgaaggcctcgacgcgatggaggctggcctgctggccctggaatcggggcagcaggacgcggagatcatcaattcggtgttccgcgccgcccactcgatcaagggcggcgccggcaccttcggcttcgatgccatcgccggcctgacccacgtgctggaaacgctgctcgatgagctgcgtgccggcaagcgggccctggaaggccatgccgtcgatgccatgctgtcctcggtggatgtactgcgcgccctgctgcgcgaagccgaacatggccaggccgcagaccccgctgcggtcgccgcagtgaaggcgcgcctcgaagccgttctctccggccaggccgcaccgagcgcgccggccgctgccgcagccaaggtggacgatacgccggaagcctggcagatcgggttcaccccggcaccctcgctgttcatgagcggcaacgacccgttgcgcatcatccgcgaactggaacacctcggctcgctgcaggtggccgcgcgcatggaacgcctgccgggcttcgcccagctcgacccgctggaggcccacctggcgtgggacctgggcctggtcggcaaggtgccgcgcagcaagatcgaagacaccttcgcctgggtgctggacgactgcgaactggacatccgtccggccgcgccgccgagcctggcaacccaggcgcccgttgctgcatccccttccacacctgctgccgtcgtgccggcagcgcctgctgcgcctgccgccggcggtgctgccacccaggaagccgaaacgtcgatccgcgtcagcgtcgacaaggtcgatgcgctgatcaacctggtcggcgaactggtcatcacccaggccatgctcaagcaggtctcgcacgcgctggacccggtccacgccgagagcctgttcgccggcctggaccagctggaacgcaacacccgcgatctgcaggaagcggtgatcggcgtgcgcatgctgccggtcgacgcggtgttccgccgcttcccgcgcctggtccgcgacttgtccagccgcctcggcaagcaggtgcgcctgcgcaccgtcggcgagggcaccgagctggacaaggggctgatcgagaaaatcgccgatccactggtgcacctggtgcgcaactcgatcgaccacggcctggaaatgcccgacgtgcgtcgcggcgcgggcaaggacgaaaccggcacgatcaccctggccgcttcgcaccagggcggccatatcgtcattgaagtgagcgacgacggccgcggcctggatcgcgccaagatcctggccaaggccgccgaacgcggcctggccgtaccggacaacccgaccgattcgcaggtctgggacctgatcttccagccaggcttctccactgccgatgcggtcaccgacctgtccgggcgtggcgtcggcatggacgtggttcgccgcaacatccaggcactgggcggtgaggtccagatcgaaagcagcctgggtactggcacccgcacgctgatccgcctgccgctgaccctggccatcctcgacggcatgaccgtggccgttgccggcgaaaccctgatcctgccgctggcctatgtgcttgaggcgttgcagccgcaggccgaggacattcgcagcatggccggcgaaggccgcgtgctgcgcgtacgtggcgagtacctgccgatcctctcgctgagcgagtactacggctacggcaaccgtgcgccgggcagtgaatcgctggtggtcgtggtcgaaggcgatggccagaagatcgcactggaagtggatgaactggtcggccagcagcaggtggtggtgaagaacatcgagaacaactaccgccgtatcggcggggtgtccggtgccaccatccttggcgacggccgcgtcgcgttgatcgtcgacatcggcggactggtgcgctcgttgcggatgccgcaggccgcctga

SEQ ID NO: 535568 - DNA, 654 bp, Stenotrophomonas maltophilia; identical to SEQ ID NO: 510587

SEQ ID NO: 535569 - DNA, 276 bp, Stenotrophomonas maltophilia
atgaatctcctgcatcgctggcaacactacttcagcaatctctccgtccggcgcaagctcaacctgctgacgctgctcatcgcgctcggcgtgatcgcgctctcggtgatcgccgcccgcatgcagtacctggacctcaccgagacccgtaagaccgcgctgaagacccaggtcgaactcagctacggcatcctccagcactaccaccgtctggccggcaccggcgaactcagcgaggacgccgcgaagagcgcgcgttgcaggccctggaagtga

SEQ ID NO: 535570 - DNA, 744 bp, Stenotrophomonas maltophilia
atgcgcgcggacaccttctggaagcgtctcgtcgatctccttcagcttggcagcggttcgctgagcgacttcgcggctgttctcaccaatgagcatgaatgcagtaccaagtaccacttccttgccatctttggtcgctgcacccgttcgcagttcggtgccctcgtgaacgtctgcgaggtcaccgacgcgaagcggcagcccctcgcgattggcgaccacgatcttgcgcaggccgtccatgtccgccacttggccaggaacgcgcacaaggtactgttcaccactcttttcaatgtagccggcactcacgttcgcattgctgcgcgccacggcctccatcacatcctgcatggtcagctcgtacgcctgaagcttgcgcgggtcaggcgtgatgtggaactgccgcacatagccaccgacggtgttgacctctgtaacacctttcagatgtcgcatctgggggcgtaccacccaatcctggagggtacgaagcgccatcggcgtccaggtctcttcagcacccttctcggcttccacggtgtacatgaagatctcaccgagaccggtggcgaccgggcccagcgttggcttcagcccagttgggagctgggatgcggcttgctgcaagcgctcggccacctgctgccgcgcgaagtagatgtcggtaccgtcttcgaatacaacggtgacctgggagagaccataacgcgagatggaccgcgtgtactccagcttggctaa

SEQ ID NO: 535571 - DNA, 252 bp, Stenotrophomonas maltophilia
atgcggcagcgagtttggcaagcacttcgttacagagacttctctcgttacctaggttgggtcagctggtcgccgatccttgccggccttgataccggctgtccagtcaccatcgaacccaatgacgcatatcgcttcctagttcccttggaactggccgagaagctgatcgcgaaaagtagttccaattgcatcgcagcctccgtgcaggatgctctgtggaacaactactactccgatcgctactcctaa

SEQ ID NO: 535572 - DNA, 831 bp, Stenotrophomonas maltophilia
atgagtaccgtcacgatctaccacaacccggactgcggcacgtcgcgcaacacgctggcgctgatccgcgccagcggcatcgagcccacggtcatcgagtacctgaagacgccgcccgaccgcgagaccttgaaggcgctgatcgcgcggatgggcatgggcgtgcgggatgtgttgcgcatcaagggcacgccctacaaggaactgggcctggatgccgcgcattggagcgacgaccagttgatcgatcagatgctggcgtacccgatcctcatcaatcggcccatcgtggtgtcgcgctcgggcgtgcgcctgtgccgcccctcggacatggtgatcgacctgctgccgcaacgaccagcgggcgagaaccgcaaggaggatggcacgccgctgctggtggatacgccgatcgccggcagcgacccggacctcgccctggctttgcaagaggccgtgcttcccacggacgacctggccgaaccagggcgcagcttcttcgcctatgccacggtgtccggcgagcgcgtgggctacggcggcttcgagcgcctgggccgagacgtgctcgtgcgctccctggtggtgctgccacacgcacgccatcgcggcatcggcggcggaatgttcgcactgctgctgcgccgtgccttcgacgagggcgggcgcgacgcctggttgctgaccacgacggctgcgccgttcttcgagcgcgcgggcttcaagccaatcgagcgcagcgccgcaccggcgaccatccttgccacacggcaggccgcaagcctttgtccttcgagcgccgtgctgcttggacgtcgaatgtcactgtga

SEQ ID NO: 535573 - DNA, 408 bp, Stenotrophomonas maltophilia
atgaacaccgaaccggatagcctgaccatcggcgccttcgccaaggcggccggggtcaatgtcgagacaatccgcttctatcagctcaaggggctactggcgacaccggaccggccctacggcagcatccgccgctacagcggcgctgatgtggcgcgggtgaggttcgtgaaggccgcccagcgtctgggcttcaacctggacgagatcgggcagctcctgaggctggaggatggcacccattgcagcgaggcagcggaactggcgtcgcagcggctggacgacgtgcaagccaagctggccgacctgacccggatcgaggcagccttgtccaagttggtcggtgaatgccacgcgcatcaaggcaatgtgtcctgtccgctgatcgccgccttgcattgccgatag

SEQ ID NO: 535574 - DNA, 279 bp, Stenotrophomonas maltophilia
atgaagaaacttgccgcactcgtggccctggccgccacccttgccacacccgcctgggccgccgtccagaccgtcacgctgtccgtgcccggcatgacctgcgcggcctgcccgatcacggtgaagaaggcgctctccaaggtcgagggcgtcaaccaggtcgacgtgagtttcgacaagcgtgaagcggtcgtgaccttcgacgacgccaagaccaccgtccagaagctgaccgaggccaccaccaacgccggctatccgtccagcatcaagcgctga

SEQ ID NO: 535575 - DNA, 423 bp, Stenotrophomonas maltophilia
atgacaccgattgcgcgtatcgccgacaaggccggggcattgggtaccgtcgtttccgcgatgggctgcgcggcctgctttcccgcgctcgccagtctgggtgcagccatcgggctgggcttcctccagcagtacgaaggcctgttcatttcccggctgctgccgctgttcgccgccctggcgctggtggcgaacgcgctgggttggctgcgccaccggcaatggcaccgcagtctgctcggcatggtcggcccagccatcgtcatcgtcggcacggtctggctgcttgccaccgcgtggatgcggcccctggtctacacgggaatcgccttgatggtcggtgtgtcgatctgggatctggtgtcaccggccaaccgccgctgcgggtcggaagagtgcgcactccccccgaaacacggatga

SEQ ID NO: 535576 - DNA, 1686 bp, Stenotrophomonas maltophilia
atgacacaactgagaatcaccggcatgacctgcgaatcgtgcgcggcccatgtcaaggaagcgctggagcgggtgcccggcgtgcgttcggccgaggtgtcttacgccaagggcaatgcgaccctggccatgaccgcagagacttcgaccaacgctctactcgccgccgtcgtcgggctcggatatcgggccgcgctggctgacgcaccaagcgcgccgccgcgcggcgggctgctcgaccgcgtgcgcgaatgggttggtggcggaagccaagccggtcacggcaacggcaagctgcacatcgccgtcatcggcagcggcggggcggcgatggccgctgcgctcaaggccgtcgaacagggtgcgcgcgtcacgctgatcgagcgcggcaccatcggcggcacctgcgtgaatgtcggctgcatcccgtccaagatcatgatccgtgccgcccacatcgcccatctgcgcacggcgagcccgttcgacgacggcatcgcagcggcaacgccggccatccttcgcgagcggctgcttgcccagcagcaagcgcgcgtcgaggaactgcgccacgccaagtacgaaagcattctggacagcaatccagtcatcacgcggctggcgggcgaggcccggttcaaggacgcgcgcacgctgaccgtggcgaccgcagacggcggcacgcgcgaagtgagtttcgaccgctgcctgatcgcgaccggcgcaagtccggcgatcccgccgatccccggcctgaaggacacgccgtactggacctcgaccgaggcgctggcgagcgacacgatccctgtgcggctggcggtgatcggctcgtcggtggtggccgttgaactggcgcaagccttcgcccggctgggcagccaggtcacggtcctggcgcgcagcacgctgttcttccgcgaggacccggccatcggcgcggctgtgaccgatgccttccgcgccgaagggatagccgtgctggagcatacccaggcgagtcaggtggcttatcaggacggtgaattcgtgctcacgaccgcccaaggtgagctgcgtgccgacaagttgctgatcgccaccggccgcagcccgaacacgcgcagcctgaatctcgaagccgccggcgtgacggtgaacccgcaaggcgccatcgtcgtcgatgacggcctacgcacgagcgcgccggacatctatgctgccggcgactgcaccgaccagccgcagttcgtttacgtcgcggcggccggcggcacgcgcgcggccgtcaacatgaccggcggcgaggcggcgcttgatctcaccgcaatgccggccgtggtcttcaccgacccgcaggtcgccaccgtcgggctgtccgaagccgaggcccacctcaaaggaatcgagaccgacagccgcacgctcacgctcgacaacgtgccgcgtgccctcgccaactttgacacgcgcggcttcatcaagctggtgatcgaagaaggctcacgtcgcttgatcggcgtgcaggcggtcacgccagaggcgggcgaactgatccaggcggccgcgctggcgatccgtgcccgcatgacggtggaagaacttgccgaccagttgttcccttacctaacgatggtcgaggggctcaagctcgcggcgcagaccttcaagaaggacgtgaaggcgttgtcctgctgcgccgggtaa

SEQ ID NO: 535577 - DNA, 366 bp, Stenotrophomonas maltophilia
atgggggattcggtcgacatgctcggcgacgcgctggtctacggattgagcctctttgccttgcaccgcggtgcgaagtgggaagccggcgcggcactcgcaaagggcgtaatcatcctgggcttcttcggcgtgatcgtggccgagatcgttcagaagctcctgcatggcgtaacgccgtccagcaccctgatgctgaccttcggcagcattgccctgatcgccaatctgacctgcctagcgttgctgcggcggttccgctcgctcaccggccacgccggcgagcctggaaatggtgtaaccgtccatcgcttcctcctttccgttacccggcgcagcaggacaacgccttcacgtccttcttga

SEQ ID NO: 535578 - DNA, 138 bp, Stenotrophomonas maltophilia
atgagcaggtcaaagcgatatcgtgcttccaagtgggaccacctcaaggcgctgtcgctgagcgaggccattgcccgtcccatcggggtgccggtcgcaagtgaagaaaagggcgaaaccgcgtcccaggaggcttga

SEQ ID NO: 535579 - DNA, 978 bp, Stenotrophomonas maltophilia
atggaccgactgaccctcgaacgccgccaggtctggatctaccttgccgccatcgcaggcggcctggtgctgggcaccgttgcgcccgagatcgggccgcgcttcgaggtcttgttgtggtcggtgccggccgcgctgctctacacgaccttcgtgcaggtgccgttgctccatgtacgcgacgccttccgggaccggcgcttcgtgctggccatcctgctcgggaacttcgtgctgatcccgctggtgctgtggctggcactccagtggctgccgggcgacccggccctgcgcctcggcgtgctgctggtcttgttggtgccgtgcactgactggttcatcaccttcacccaactcggccgcggcacgccggcacgagccatcgccgtcacgccgctcaatctgctggcacagctgttgctgttgccggtctacctctggctgatgctgccggtggccgatttcagcgcggcgctgaagaccgaagagatgctgcccgctgcactcgcgctgatcgggctgcccctcgtggccgccgcgctcagcgaacgctgggtcgaggcgcggacagagcgggccatctggcgcgagcgactcggctggtggccggtgcccttgctggcggtagtggtgttcctgatcgccggtgcgcaggtcggtacggtgctcgatgccgggcccgtgctgctgatggtgctgccggtgttcgtcggcttcctgctggttgccgcgctgctggcgcgcggtctcacccggtggttgcggctgccgatggacaccggccgcacgctggccttcagcttcggcacccgcaattccttcgtcgtgctgccgttcgcgctggccttgcctgccggctgggacaccaccgtggtggtgatcgtgttccagtcgttggtggagctgttcgggatggtgttctacctctggtggctgccgcgtcatctgttccgggaaccgatgaaggctggggcatga

SEQ ID NO: 535580 - DNA, 1257 bp, Stenotrophomonas maltophilia
atgaagaccgtgacagaaaacatcaccaacaatgacaactcggtccaggggaacgggtggctgaaccgcaccgtcgccggcgccgggatcaccagcgcgctcggcgatttctgctacgagaccaccaccgtgatcctgcccggcttcctggccgtgctgggcattccggccgccgcgctgggcatcatcgagggcattgcggatgcggtggcgagcttcaccaagatggtgtcggggtacatcgccgacaaactgggccaccgcaagcttctggtgctggtcggttacgggctcaccccgctgggccaggccctgatcgccctggccgcgggctggccgctgatcctgctcgggcgcatggtgtcctggttcggcaagggcctgcgcggcccgttacgcgacgccatcgtgatccaggcggtcagccccgcgacgcgcgggcgcgccttcggttttcatcgcgcggcggacaccgtcggcgcagtgttcggcccgctgttgggcgtggtcttgctggggctcgctcagggctggcactggagcgacgacgccggccccttccgcttcgtgctgtggctctcgctcattcccggcctgctggcgctgctggccttcctcgcattggtgcaggacccgcagcattcgccgaatccggcgctcaagttcttcggctcgctgcgcgggctgccgtcccggttcaagcgctatctcggcgctgtcggactgttcggcgtcggtgatttctcccacaccttgttgatcctcgccgccaccacgctgctcaccccgtcgatgggcgtggtgcaggccgcgcaggtggccgggctgctctatgtgtggcgcaatgtcgtgcaagtggccgcgtcgtggccggtgggttggctcgccgatcgcgtcggccacctgcccgtgctggtggcgggctacggcctgggtgttgccacggcggtgctgaccgcgctggccttctggtctgacctcgacagcgtggcgctgctcgcgggaatcttctgcatcgccggtctgtatgtcgccgtgcaggaggcgctggaatccaccgtgactgccgaaatggtgccggccgagaccatgaccatgagcatgggcgcgctgggcaccgtcaacggcacggccaagtttctctccagcgccacggtcggcgtggtgtggacggcggtctcgccggtgttggcgtttgccttggcggccaccttcatgctggccggcacgctcgccatcctgcgggtgcgcgactga

SEQ ID NO: 535581 - DNA, 987 bp, Stenotrophomonas maltophilia
atgcataccgaaaacctgtccaactggatgcacggccacgtcttcgataccggtaacgacgccgccgagcgcagcacgcgggtggtgatgtggatcacggccgtgatgatggtggtcgagatcgctgcgggctggtggttcaactcgatggctctgctggccgacggctggcacatgagttcccacgccgtcgcgatcggtctgtccgcgatggcctatgccaccgcccggcgctatgcgaaggacccgcgcttcgcattcggtacctggaaaatcgaaatcctggggggcttcgccagcgccatcttcctactgggcggggccgtgatgatggtggtgggctcggtggagcggatcgtctcgccgcagcccatccagtaccaggaagcgattgtgatcgccgtcctcgggttggcggtgaatgtcatttgcgcattgattctcggcaaggcgcaccatcatgaccatggtcattctcatgggcacgatcatggccatgtgcatcaccacggcgaccatcacgatctcaacctgaagtcggcctacctgcacgtcatcgccgacgccgccacatcggtcctcgccatcgtggccctggtcggtgggtggatctacggctggtcctggctggacccggtcatgggcatcgtcggtgccgtgttggttgccgtctgggccaagggtctcatcaccgatacgggcaaggtgctgctcgaccgcgagatggatcaccccgtggtcgatgagattcgggaggtggtggaaaccgggccggacgccggtgacgcgcgaatcaccgacctgcacgtctggcgcgtgggcaagcaggtctattcgtgcgccctgaccgtggtgacccacgacagcgcgctgacgccggacgtcgtgcgtgagcgcctgtcggtgcacgaggagatcgtccattcgaccatcgagatccaccactgtcccgatgcgccgacagatgcagtccgggcgacgacatga

SEQ ID NO: 535582 - DNA, 279 bp, Stenotrophomonas maltophilia
gtgagccacaccatccgcgaaaaatccaagttgctgggccgcgtgcgccgcatacgcggccaggtggaggcgctggaacgcgcgctggacgccgaaaaagggtgcgccgaagtcctgcaccagatcgccgcggtgcggggggccatcaatggactgatgacagaagtcctggaggagcacgttcgcacgcatatcgccgacccgtcgatcagcagcgacgccgagcgaacgcagggggccaaagaattgatcgacgtactgcgcgcctacatcaagtga

SEQ ID NO: 535583 - DNA, 363 bp, Stenotrophomonas maltophilia
atgaccaccaacacgcacaacgggcgctggagccaccggctgggccggggggctggccgtgcctggcgtggatacctgcgccgcgagcagcgtgtagccggctggctggtgacgcgcggggtgcctgcgggcgcgatcacggcggtgctctggatcgtcaagctggccgtacttggcgtgctgctctacaccgtatcctggctcgtcctgctgcttgcctttgcggtggtcgccgcatggctcgcgcggaacgccgatgcggatgatgagaaccagccagagtggcgtgaaggacactccggccatggtctgtacgacaagaacgagtggcgccacgacatgggcgactctgacgagtcgtag

SEQ ID NO: 535584 - DNA, 270 bp, Stenotrophomonas maltophilia
gtgcccaaagcggcgcttgcgcggccgccgcctacccgccagactcgccaaaaagggcggttgaacttcctatacccgagctatagcccggagttgaacccggatgagatggccaatgcggatatcaagcaggcggtcacgaagctggcaccggcgcgaacgaagctgcaactggccaaagccacagccaagcaccttcgcagcgtgcaacgccagcccgagcgcatccgcaagtacttcgagcacgccacggtacgctatgcggcttga

SEQ ID NO: 535585 - DNA, 1353 bp, Stenotrophomonas maltophilia
atggccaaggcaaacggcttcgccgtactcctcacgaaagatcggatgagcacattccttgagtgtgtcgccgaggatcgagcgttcgccgaacctgttgccgattttcagcacagccgaaatgtgcccctggtttgtttcatcgtcgacgcacgcaaaattacccatattggcctaggacgcagaggcacccgtgctggcaccggactccgccgtctgaacatcgaccgtgtcgaaaagctcgcagagcctttgtcggttcagcgagtcaccaatcgattgccaaaacgcaatgccgcatccgtgaggaagcgcttcaaatccggcgggctcctgaaagacaaaggttttatcgccgtcatcgaggccattcggcagcttgcacctcaggcaaattcattgctggagcggttcagtcaaacacgaactgcacgtattcaaagtctgtcccccaaagtgaaggacaacctggcacagcagaaagaagctgtgctcaccgcactatccattgcagggttgagccgcgagcccgttcaaaattggtcgccgccagaggtaacgccagcatctttccttgatggcttgtccagcgctcgattgcgcgaagatcagatggtcatcaatgacctgatgaagatcccaggcttcactctgattcgagaccaagtgagcgttaccggcgctgcagtgtttgaatcagaagcaacgtcggaacggctcacggtcattcttgccaaccggcttccgttggaagagcagactggcactgacctcatctatttcaacgagacgtatcagagctttgtcatggttcagtacaaggcgatggagcgtgaagatgggccaaacggcgttcctcaagcaattttccggttgccgaacacgcagctcgctgaagagatcacgcgcatggatgccttgctggcaaccatacaggcttgtccggccaatacctcgcatgatggctatcgcctgacagagagcccattcttcctgaagctttgctcccggctggttttcaacccggacgatatcgggcttgtaccgggcatgtatctgccactcgactattggaagctgctggtccagagcccaggcatcccgggtccgcgcggtggactgcgcgtgacctttgaaaacgccggacgacatttcgacaactcgtctttcacgaccatcgtttccaaggcctgggtgggcacaactccaagccagtcagacgtcttgaaggaagcaattcgccagacactcgaaaccggaaaagccgtagccatcgcggtaaagcccaagaaattagacgctgctgacactggcgagcgaatcgaccttagcgagatcacacccaatgactga

SEQ ID NO: 535586 - DNA, 2775 bp, Stenotrophomonas maltophilia
atgactgattttttccagaatcaaaatacgacaaccggtccagtggaatgccttggccagacattccccagcgaacaagcccggcgcgagcacttcaccaagctgctggccgagaagttgaaagatccggcgttccgcaaaatcgagggtttcccgcaaggcacggacgaggccatcctcgcgatgtcggacccgccgtactacaccgcgtgcccgaatcccttcctcgaagacttcgtgcgtcactacggcaagccatacgacccgagcgtgaagtacagccgcgagccgcagactatcgacgtttccgtcggcaagaccgacccgatctataaagcgcactcgtatcacacgaaggtaccgcaccttgcgatcgtcccgtcgatcctgcactacacggagccgggtgacatcgtcctggatggttttggcggctccggcatgaccggcgttgcggctcagtggtgcggatcggcaccttcagcctatcgacatgagctggaaaccgaatggaagaagcaaggcaaaaccgcgcccaagtggggagcccggcgcgtcatcctgaatgacctgtcgccagccgccacctttatcgcagccaactacaacctgccgttcgacgtagaggcatttgccaaggcaggcaagcaactgcttaaggaggttgagcaggaaattggctggatgtatgagacgacgcacacggacggcaaaaccaaaggcagagtcgaattcacggtctggagtgaggtttttacgtgcccgcattgcgcaggtgaaatcaacttcatcgacgaggccctagacgaggacagtaagagagtaagggatacctttccttgtccgcactgcggcgcagacgtgaacaaagacaaccttgaccgggttctcgaggctcgagtcgaccctgcgactggcgaaacatggaagcgcgttaagtttcgtccgtcagtgatgtcttatgttgcgggaggggttcggcgagaaaaacaggtcgaccaagacgatctggctgttttggcaaagatcgatgcaatgccgctgccggccggtatgcctacagttcgctttcctattgagcagatgtatcacggctcgcgaatcgagccgaagggtttttcgagcgtccaccactttttcttgcctcgtgctgggcacgcgcttgcggctttgtggacaaaggccaacgcgcatccggataaacgtattcgcgaaatgctcttgttcttcattgaacaatcgatctggggtttctcggtcctaaatagatacagtccgtcccacttctcacaggtgaatcgtgcactcaatggcgtctactacgtagcgtcgcaacacgcggagtgcagcccacagtacaaccttagtgggaagcttgatcgcttgataaaggcatttggcgcctacaggactgcaccaaattacgcagcgatcaacaccggaaccgctgctggattaccccttcgtgaccagagtattgattacgttttcaccgacccgccgttcggagagaacatctactacgccgacctgaatttccttgtcgaggcgtggcacggagtggtcacggatgcgaagccggaagccattgtcgataaattcaagaataaggcgcttccggaataccagcacttgatgcagcgctgcttcgccgagtattaccgcgtcctcaagcccggacgctggatgacggtggtcttctccaacagtaaagcagcagtatggaacgccatacaggtggcattgcagcaagctggattcgtagtggcggaggttactgcgctcgacaaggtgcagggtagctaccggcaggtcacgtcgaccacggcagtgaagcaggacttggtgatttctgcatacaagccgaatggtggcttggaggatcgcttcaaccgaactggtgcgactgtagagacagcgtgggactttgtgcagacgcacttgaagcaactgcctgccgtgaaagtcacgtctggctacccgcaggagcttttgaacatcgtagagcgcgaccctcgtcgcatctacgaccgcatggcgtcttggtttatccgccacggcgcaatggtgccaatctcgacgccggattttttggctgaactacccgttcgtttccgcgagatggacggcatggtgttcttgcccgaacagctggtcgagtacgaaaaggcgcggtcgcgtatcccgcaagtgaaacaagcggaattgttcgtttccgacgaacgaagcgccatcgactggctgaccaactttttactcaagcgcccatcgactcggtcggaaatccaccccgagtacatcccgcagatcggggcggccaagcgcaagggcgagatcattccggagctggaccagctgcttgaggacaacttcttgcgctacgacggtatcggcgaggtgccgagccaaattcacagctacctctcgaccaaccacaaggatctgcgcgggctggagaaggacagtcccgcactgatggcaaaggccaaggatcgctggtacgtgcctgacccgaacaaggcgcaggacttggagaaaaagcgcgagaaggcactgctcaaagagttcgagacctacaaggccttcactggacgaaagatcaaagagtcgcgacttgaagtgctgcgtgccggtttccgtgctgcgtgggccgccaaggactacaagaccatcatcgggatcgccaacaagctgccagaggaaacgctgcaagaggacgagaagctgctcaccctctatgacctcgcgctgaccagaacggaggacggattatga

SEQ ID NO: 535587 - DNA, 1035 bp, Stenotrophomonas maltophilia
atgagcaagatcacgcatatcaagctggacaacttcacatcctttgccgggctggaccagacgttctcgtcaggtgtaaacgtcatcatcggagccaatggcacgggcaaaacgcacttgcttaaagtgctgtatgcggcgtgtgcggtgaccgtcggtgaagacaaagaaaagagctttgcactcaagctgcgcaatgtattcaacccgtatgagggccgcattggtcggctggcacgtcgacagtcgagcagcatacaaaccaaagctgtggtcactcgtgagggtggcgcaaagctagcggcagaattttccaatcacaccaacaaaccggaggatgtgaagatcactggcgaagcatcctggaaaaaagaagagcttgccagtgcgtatatcccagtcaaggagatgctggcccatgcgccaggctttcttgccactgccgccaagcgggaaattgcctttgaagaagtctatgtggacataatcaagcgcgccttcctcccgaagttgatgggccctacagacaaaaatcgtcagcgtttgctgacagctctacagaaagctattgacggcaaggtggtgtctaagggtgagcacttttttctcaagaacaaacagggcgatctcgaattcactttgttggctgagggtatgcgcaagctggctttgatctggttgctgatccagaacggcacgttgctctcgggatctgtgctgttttgggatgagccagaagccaacctgaacccggctttgatgggcgaagtggtcgagttgatcttggagttgcaacgtatgggcgtccaggtcttcctgacaacccataactatgtgctgctcaaggagtttgacttgcgcaagcagaaagatgaccggattcgctatctgtcgctattccgggatgagtcagaagctgttgttgccaaggcgagtgatgtttatcttggcgttaatccaaatgcgattgcagcaacattcaacgatctttacgaccgtgagctaaaacgcagtctgggagacatcaagccgtga

SEQ ID NO: 535588 - DNA, 411 bp, Stenotrophomonas maltophilia
atgaaggcagtggactttatcgtcgagtttgaagaccggacatactttatcgagttcaaggatcctgaaaatccaaatgctaagccaaaggatgccgctgcgttcctttcaaaatttatgagcggcgcaattgatagtgacctcaagaccaagtatcgggactcgtggttgtatgaatatgccgaaggtcgtacaaagaagcctatctattacgtcgttctgatcggcgcgagcacgctgtcagatgccgagttgataacgcgaactgatgcccttaagcgccagatccccatgaatggacccgcaggtcttagctggaagaaaccatttgtggctggttgtgcagtgatgaatctgcctgcctggaacaaaatgctggcacatatgccggcaacccgggtcgctccatga

SEQ ID NO: 535589 - DNA, 723 bp, Stenotrophomonas maltophilia
atgctggcatggcgaccgttccggctggccgtcaatgtttcggcgagccaagtgggaccggacttcgacgggtgggtaaagggcgtgctggctgatgccgagttgcccgccgagtatctcgaaatcgagctgaccgaatcggtcgcgtttggtgatccggcgatcttccccgccctggacgccttgcggcagatcggtgtgcgcttcgccgccgatgacttcgggacggggtattcctgtctgcaacatctgaagtgctgcccaatcagcacgctcaagatcgaccaatcgtttgtcgccgggctcgccaacgaccgccgcgaccaaaccatcgtgcacaccgtgattcagcttgcgcacgggctgggcatggatgtggtggctgaaggcgtggaaacatcggcgagtcttgatctattgcgacaagcggactgcgacacaggacaaggcttcctgttcgcgaagccaatgccggcggcggcattcgccgtcttcgtcagtcaatggaggggtgccaccatgaatgcaagtgactcgaccaccaccagttgctgcgtgtgctgcaaggaaatcccgctcgatgccgccttcaccccggaaggcgcggaatacgtcgagcacttctgcgggttggagtgttatcaacgcttcgaagcgcgtgccaagacagggaacgaaaccgatgccgatccgaacgcctgcgactcgctaccgtcagattga

SEQ ID NO: 535590 - DNA, 825 bp, Stenotrophomonas maltophilia
atgacgaacgtgaagagtttgcagcatgagcttgatctcgagattgcctctctccagaaaaggtttattgatcgctgggtgccggctcagccagacacggcgcctgagcattttgaacatgacgtgaaggcgttctgcgttcttgcgcatgccgcttttgaagagtttgtagaggaattgtcgctgtttgcgatggattcagcccgtctggcttggctttcaaggcgatttagtcgtggaacaattgcactgctgtgcggttataagcgaacagttgacttcatcgatagcgatttcgaggagcaggtgggggttcgagatcaagtggatgccgggatcgagagttgccgtgcgtcccacaattacacgatctcaaagaaccacggattctctcgggcttaccttcggtcgctattcacccctgtaggggtagatgtgcctgacgacgctgacctcctccaatgtctcggtgagcttgcagaggcacgaggctcgttcgcccacagcagatccaattcagctcatttcggtagaaaaaagtctgcgaggcgaccgatgaccccggagcgcgcccgagagattgttgaaagctgccagctactatgcgaggcgcttgcggggcgtgtgagcgagttgatcgtgaccggccaggtgggtctccagtggccgaagtggtgtggaccgaacgggccgtcgaggtggaggccaagacgtcccaggcgaagagtgagctggaagatgcccaataggaacgagggtgcagcgaagttgcctcagtcgcagaaggagatgggattcgttcagtgcgatcccgaaccatcctga

SEQ ID NO: 535591 - DNA, 1152 bp, Stenotrophomonas maltophilia
atggctagcgacattgtggatgaagattggaacgacgatctcgcaggcgaggttactgcgaagggggtagattccctcgtggtctactcacgcgattggacggtggacaccatcttgcgacaggttgagcaagggaacatcgacttgaatcctcagttccagcgcagaaacgcatggacggatgccaagaggagcaaactcattgagtcactcatcatcggtgttccggttcctgaaattgttctcgcagaggatgtgaccaggaggaagtcattcatcgtgattgacgggaagcagcgcttgctggccttggctggtttctcggacaatcaagtatataagagttgggaaaggccgacattgagggatttgaagacgcggtctgatctgaatgatcagagtgtcgatgatctgcggcgaagtgaggatgattataggcagctgatgaatgctgatattcgctgcactgtgatatcgaactatcaatcatcagatgtgttgtacgacatattctatcgtctaaatacgggctcggtcccgcttagctctcaagagctgcgtcaagttttgaagcgcggtaaattctcggatttcctaatatcttcaactaatatcaggcttcccctgcatgaagttttgcgtctgaaaggcccggataagcgacttcgggatgcagaaattgtactgcgttacatcgctatctcactttgtggcatggattatcgggggagcctaactccatttctggatggggcggctgagctgatcaatgataactgggatgaactagagccggtggttcgagagcagtttgatgccatgaattgggccaccaacgctcttatcgataaatttggaaagagagtgggtagaaaggcgctttccaccggttgggagtctcgtttcaatcgagccctgtttgaggttcaagtgtactattttgccaggattcctgatgaggtcatggatgaagtggatgcttctgccgtgcagcaagcattttctgcattttgctctgaatcaattgagtttcgcgacgcgatcgagacaaccacaaagaacccgcgtcgatatcgaaaacggtatgaattgttccagggattcgtgaaccagttgttcggcacttccatcgacagtatccctgtgccttag

SEQ ID NO: 535592 - DNA, 210 bp, Stenotrophomonas maltophilia
atgggtgaggaaacgcgctacatcctgtgccaccccgagccttgcgcctaccagcgccgcgacacgatgcccgcagataccggcgggcacagccaatggcatgaaatcggcagggacttctacatgcagctggagcgcctccacatcgaatcgccgtggaccgtccgcgggatcgagctgcgaaagctctatgcggcgaaggaggactga

SEQ ID NO: 535593 - DNA, 897 bp, Stenotrophomonas maltophilia
atgaacttgaacgtcgctcgccagagaatgccaaggagtacgagcttttccttccgcagcagattgcccaggattggaacagccagtgtcccgcacaccaatagtcaagagacactgtcactcgtacggcgtgtagtcctcagctggctctcctacaaaatcacggaaccggttcgcgtactcgatgctaagccccttgaagaagatcaaatgatccttgaggagttggaagtctcctggcctgcctacgtagcgaacccttcgctccggagcgctgtcagggtggagctctatagctcttgcagccataagccggaccatgtcattcaatgtacggctgttgctgatcagagttgccagatcagcacccaagctgtcaggaagattatggatgcggtcttccactctctcgctccccggaagcatagggaacgagcactctcggagaagagtattgagcgcgcgcgtgctcaagacccttactggctcgctttggactacagcggaatcgatcaaaggaagcagagaattaagccgtgcgggcaatgctgtgacctcgtgcaacagcagccgaccgataatgcgggcatcctcttttcgaagcctgacagaatcagcgtgctgaaaccgcgcaatttgggcagcgcgctgggaggtcctccaggcgagcaccgcaacaaccacagttaccaagccgaccgctccactgacgacagccggccagtcgatgacacacgtgctactcagtacctgacactccaagattccatcgctccaagacacgtaagcttccttgcccgttatgcgggcatcaacctgagtatggcgatcttctcacgcgcctgccaaatgcaggaagcatgctcgactgcatccgaggcccgcgatgcggcgtag

SEQ ID NO: 535594 - DNA, 525 bp, Stenotrophomonas maltophilia
atgctataccgcgccctcgcactggccgccctggtgctggccaccgccggtctcttcagctgccaacaggggcgcatcagtcgcgccaccaccgcgctgggtaaggccaacctcgacctggccagtgccaaggccgagaacgccgccctggccagcagcctcaagctggccgaaggcaccacccgcgtcgtgaccgagtacgtggaccgcgtacagctggtgcacgagcgcggcgccaccatcgtcaaagaggttcccatctatgtcaccgcgaacgctgatgctgcctgtgctgttcctgctggcttcgtgcagctccacgacaccgccgcgagcggcagcgccaccgccggccctgccggagatcctgatgcgcccgccgccggcgttacgctctctgccgtcgccgaaaccgttgccggcaactatgccacctgccacgccaccgccgcgcaggtagtggccctgcaggagctggcacgcaatctgcacgtcgagcttcaacggcaggcaggtacgccgtga

SEQ ID NO: 535595 - DNA, 1851 bp, Stenotrophomonas maltophilia
atgcccatcccccagatcaccattacgccggcaggctttgccgccatcgtcaacgcagagaacacgggtaccgcgccggtcaaggtcacacaggtcggcttgactgatcagcacttcgacgtgggcaccgtgggcgcatccgtgccggcggagttcaagcgcctgaccaccttcggcggcaaggccgttgcggacgacactctgcacctgaacgtgcgcgacgacggcaccgacacctacacgctgcgcggctttggcctgtacctgcaggacggcacgctgtttgccgtctactcgcagtccacgcccatcatggaaaaggcagaggccgcgaccctgctgctggccacggacattcggttcgccaagatcaacgccaccagcatcgaggtcggcgatatcgacttcatcaacccaccggcgacgaccacgcagatgggtgtggtgcggctggccaccgagcaggaagcagacgccggcagcgatcctgcaacggcaatcactccgcgcggtcttgcccgctacatcaacaaccgcttcggcgccggggcgccgtccagcttcgtcaagacgctgctcggcctggccactgccgccatgtttcgtgtcgagctggggctaaaatcagccgcgctacgcgatgagggccatgggaacggcctcaacgccgatctgctcgacggcgcccacggcgaatactatctggattggaagaacttcgctggcgtaccgaacaggttcacgcctgctccgcacacgcatcccatcggcgaagtagatggcctgcagcccgcgcttgacggcaaagccaagcgtaccggagacaccttcaccgggccgctggcggtgaatggtgccatgctgcgttcttacggatggaatggagtagccagcaacggaatcctggtgctgggcgataccgcctcctccatcgcaaaaaacggcgcctacttcgacttcaacaattcggcaggtgggtataccgccacccttgcatccggcgggacgatctggactagcggcaacctcgatcctgctaccaaagcaaacaaggccggtgacacgttcgaaggaccaaccatgatgcgtgcgggtggcccaacgtaccctgccattcgctttcacgtgcagaatctcaacggaaccaaccggaccactctggaatcggttctgggcaacggcacggcgtttgccgagcttcacagcgttgccaacggctacaaatggtggggaccgaatctgtccctactggctgaactcagcaccagcggcgctttgagattctacggcggttgcggcacgttcaacggtgcctatgccactcaggctggcgtcgttgctcgcggctgggcaaacggcgtcactcgttggatggatgtgatggaggcagatggctcgctctccctttatgcatacgacaacggtggcggcgtccccacacagttgctgcagtatcgctctaatgtcgctgggggcggaaaccgattggtcgtcatcggaggctgtagcgcctcgggcggcttcgactacggttcgtcgaggaagctgaaggagattgacggcgcgatgccgtacggcttggccgaagtgcgccgcattacgaccctgattggtcgatacaagccggagtacaacaacgatggccgaacccgtctgttctttgatgccgagcagttcatggaggtaatgccagaagcggtagacgctgagggcgtgtcgttcaatgatgagatggtgccgtcaatcaagattgaccaggtgatgccgccagcctatcgcgccatcgcagagctcgctgacatggtggacagtctgcgggcggaaattgcggcattgaaggtggggttctga

SEQ ID NO: 535596 - DNA, 657 bp, Stenotrophomonas maltophilia
atgcccagcggatatcgtagtggcggcactgacttcgatgacctattcgacttctacgtggaggggccctacgcgcgtgattcaggcatccgattgcttggaacggaccttagccggcgctacgctcatatccagtacggcagcaagcgccaggacgtgggctaccgctcgggcggcatcgatgtgtcgaacctttgggctgcaaagggcactgcaacgtatgtattgccgttccacggaaagtccttctccgctcacaatcaatcggataccaacgccactggcaacaccagtgcccaggttgagctgcgcatcctgggcgatggccgctatgaggtttggcagatcaccaacggcggtggcaacgacaacagctaccgtgccgagcaaggctattggctgcgcaacggcggtgctggcgagtacgaggtacgcttcgaattcgccaatgctggcgcagcgaacgtaggcagcaccgcgccggactggcgcaatgcgtccgcttcgcagtcctgctccgcccagatcagcgtgctgagcgcatcaagccagaacgtcagcgccgtggttgagttccattgcctcatgcgtcgagggggtggcaacgtcagccgatcgatcatggcagccagcgtcggcgcagccgggtggtactga

SEQ ID NO: 535597 - DNA, 138 bp, Stenotrophomonas maltophilia
atggccaacttgatcgccatcgctgttgcactgctcctgctggcttcggtcggcgggctactggtgtgggcattgagcgcgctttgccgcttcctgaccgtgttcgcacccgacccgtccgatacccccgcgccgtag

SEQ ID NO: 535598 - DNA, 675 bp, Stenotrophomonas maltophilia
gtgaaccggccgcgcggcttcacgttgattgagttgttgctggtgctgggcgtgctggctttgctcatcgtcgctggcttcttcatctacaaagagctgcgctttcgttacgcggtggcgatggaaggccgcaacgttcagaccgtggtggccacggtcaccacggcatcggcgcaatacggctccaccgattacctcacgctgggggccagtgcgggctacagcaccaagggcatgtggaacatgaacctgcccgcttgccaaaacggttggtgcaacgattttggcagcgtcaccaaggtttccccggccggttgctggattaccggcatgggtgcccaggtgaccaacaacgcctttgaaatccaatacagcgacctcacccggcgcgagtgcatcggcatcctcaacgccttgggcccagccgcgcccagcgcggtgcgcgtgttctcaccggctccgcaatggctgggtttctgctcccctggcaccactggctgctctgccaacggcacccgaaaggtcagcgcgctgtcacagctgcccgcaggcagtggctgtaacgcgcaattcaaagcccccatcggcccggaagcggcaatggatgtgtgcgccgaggaagaagccaaccgcttcaacctgctctacatcccggcacgcgggaggcgcttatga

SEQ ID NO: 535599 - DNA, 402 bp, Stenotrophomonas maltophilia
atgaaacgcgccctcctgccgctgctggctgccgtgctggctgccgtgctggctgcctgctccactcccgccggtcctactgaggccgacgtgctggaagccctccagaaggcttacagcgccgccctggacgtgccagccgtggaaaccaacagcgatggccagcaagtggccaggttccagggccacgacgaagcgaccgaagccgtgaccggctttcccgctgccccactggcggtctcgttgatcgcctgccacccgcatcccgccatgggccacgcctggatctgcgaagccggcgtgtcctttcccagcagtcaaaagacgtggggaacctgggtcattcaccacaccccccgcgccggttggaacgccgcgcaccaaccggagcaacaccagtga

SEQ ID NO: 535600 - DNA, 138 bp, Stenotrophomonas maltophilia
atgaaccgcacccgctcaactcgccgccgtcgtcgtaacgccaacctgtctttcctggtgctgctgccgctcgctgcggtgggcggtcccatcctcgccgcgttcgctttcctgttcgctggtgccactttcttctga

SEQ ID NO: 535601 - DNA, 309 bp, Stenotrophomonas maltophilia
atgactgcgaagcaacctgcaccgaccttcggctgcgacatggccaccggccctgacctcacctccgtagcggacatcgtggacggcaaggtcatcaacgtccgccatctacctcggcaggatccgctcacgaaaaagtcccaggttctcctggtgctgaaggccggcggacgcatcgtcacgggccaccgcccgggcctgctgcagctgctcgacgccgaagacagcccagtgcctgcctggcaaaccgccctgaaggctgcccagccctcccccgcacattccggagatacccatgaaccgcagtga

SEQ ID NO: 535602 - DNA, 279 bp, Stenotrophomonas maltophilia
atgagcgcccctatcgatgtgcgggagatcctcgcgcgaatcgcgcgcaccaatgctcagttcgcgaccactgccgaccgcgaccagatggtgcgagtgggcgaaaccatgctgaagaagcaggctgctgacctccaatccgtccttgaagcactcgatgaactgatcggtgcggcccaggccgtcgagaacagctgcgtgcgacatgacgccaatgatgcagatctgttccgccgtctggatgcggcaatcgcccgcgtcaaaggcggtgccgcatga

SEQ ID NO: 535603 - DNA, 498 bp, Stenotrophomonas maltophilia
atggttgagacggtttggggatttacggacctgcagctgcgactgttcactgcaatcggccaactggttctggcgggagcggtcggctacgtcgccttccggcaatggcttactgccaaagagcaggccacgacggcgaggaagaagctcaaagctgacctcttcgacaagcggatggcagcactgaacgaggtggagggtcccatcatcgagatcctcaagggcatggtgcccgactacaccaaagcagtgaaggtcagaaccggcgcgcgtcgattccgctatctcttcggaaaggaagcatacgcagccgcagtggaacttggggaaatggcgacagacctagccagtctgaagaatgacctcgacatgcctagcctggatccgctaaaacggcaggagacggctcgccgttacaacatcttgagcggactgctcgaccctaaactatcagtgctccacgacttctgcacagcagaattgaccctgtccgagtag

SEQ ID NO: 535604 - DNA, 225 bp, Stenotrophomonas maltophilia
atgaactggagttacccgatgatgaagttaacgagtaacaccatcatccttgaaggacgcgtaccgatgacactagtggctaaaaacaagccttcgttaaacatccctcagatcaataaaaaatctgcaacagagctcttgaaatgtaaaaaacaccccgcatatatcgaaaaaatatccgttagcttggtggttcatacttatcgagtacgccaacggggatga

SEQ ID NO: 535605 - DNA, 1083 bp, Stenotrophomonas maltophilia
atgagcagcaagaacaaagaacagctctttcgaggacttaagagagcgatccatgagggcgatttaggcacgatcgtatctctttgcgagaagcaacaggatgtagacgaggcggctcgaaatgccattgtcttggcgatcagattggatcgtgacgatgttattgagcaactgctgccgttgctgacgggctcctggcagagcgaaccattgaatgaggcggctaaagcaggcaaaacggcgtgtgtggaaatgctcagcccattctgcaacgtcgaaagcggagacgcgcttatccacgcggccaggcatgggcatgttgacgcggtcaagctgcttatgcgctcttgtagccctttggagggcgactcccaagcgctatatgaggcctcccttcatggccacgccgatgtcgtcttccaattggttctattctcgaatgctaaggtcagggatagtcgggcactgatcgcggcttgtaaggcaggccatttggaagtggtgaagcaccttctaccgttctcgtccaagatccaatgcgcgaaacggggacttgaagctgcggcagagcacaaccatgaggccattatcaagttcctgatcgcggccggacttcccgatccagaggatacgtacagcgcagggttgaacatcgcagctgcaaaggggcatgtctcgttggtccgaactctgctttgggccattgtccgaaccggctttgccccgcgcgacttcggccaggaggccctattcgttgccgccaagaacggtcatgccgaggtggtgaagtcggtcatggaatttgcgcataaaaccgcttatcccgaagcggccctatacgctgctctgctgggcgctcacgacgcggtcgcggatctattggttcgccgggtcaatttggaccaggtgcgtgagctaatttcagacgaggaaattgaggtgagactggatcggtcaatggcgagggttgccgccgccgcgcagaacaagggactgcggtccaatgagaggagtcgagagaagggatatgaagcggcggcgggaagtctgcctaaaaggcagcatcctgcgcgccggctatga

SEQ ID NO: 535606 - DNA, 669 bp, Stenotrophomonas maltophilia
atgacactgattagcaatcaagacagcttggaagaggggttcattcgatctgccctagagatcatcgccaaccctggagaaaggtcagccgtcgttgcgcgatcagatcatcaaactgttcgccagctcctagatcaggcgccaagcagtacgcgctttacgcagtcaatggctgagttctacttggccattccacggcggcaattcgaagctctaaagcgcacgcatctcaacccgttcgcccacgctgttggccgtccgaagatgatcagcaagggagagatcttgacttggttcgggcacatcaacaaatctctgcatgccatgacaggcaaggtggaaggtcgccttgggagagcgcccgacggaacgccttttattgtgatgcgcgacgccaagaagaagataaaccgcatcgtctcgcatgctggcatcacaactcttgatcttgacgcgatagaagatgcctttgcccgcggcgcaaagatcgcggcgcttagcgttgatcaagcactgatgctcccctgggctaaccctgccgagaagcgcctatggcgacaggcctaccgaatccatatcgaccgagctcatgcagaaacagtggcgctcttggataggcaggagctcgatgaagcaacggtcatatcgcgtgaatcgacggtcagctag

SEQ ID NO: 535607 - DNA, 828 bp, Stenotrophomonas maltophilia
atggacacatggtctcgaaacaacgtgaaagtgatgggacgcggctcgacgaccttgctgttcgcacacggatacggttgtgaccagacgatgtggcgacgggtggtgcccctgctgggtaaggattatcgaattgtcctgttcgactatgtcggatacggacagtcggatctgtcggcgtatgatcccgaccggtattccgtgctagatggttatgtccaagatctaatcgaggtcgcgctatcggtggacgatggcggggccttggtaatggtaggtcattcggtcagcgcgatgattggtctattggctgacaagaggcgccaggggattttcagcgcccatgtgatgattggcccgtcaccggcttacgtgaacgagcccggatacgtgggcggatttgagcggtcagatattgacgagttgctagagaccttggaaggtaactacttgggttgggcgagttcgatggcgcctgcaatcatgggagcaccagagcagcctgagttggcgcaggagctcaccaatagcttctgtcgtacggatccaagcatcgccgtccagtttgcgcgagccacttttctaagtaataacttagcggacctcggaggcttaaggtcacctacgctcacccttcaaagcacccaagacttcattgcgccggtgtccgttggagagtacatgagagacgtgatgcctgacgccactctgcaactcatcgacaatctggggcactgtccccatttgagcgcccccgaagcctgcgtatgcgccatcgaggtgtttctcgctcaaaagggtatggcgaccaatcgctgcgacgtatga

SEQ ID NO: 535608 - DNA, 1131 bp, Stenotrophomonas maltophilia
atgaacatctctgccgaccagcggtttgaagatgctgcctgtggtctgctctggacccgaagagatggcactgttctggcagccaatccaaccttttgccagtggctcaactacgacgccgtggatatcgttgggcgcacctttcaagacctgctgaccatgggcggcaaattgtttcaccagacccactggttccccctcttggagatgcaaggctcggtgacggaagtcaaattagacttctacaacaagcacggccagaaggttgcgatgctcgtcaacgctcgagcgattgaaacgaagggtggcgaaatcgcttactccatcgccaccttggcttccagggaccgagataggtatgaaagagaattgctaaaggcacgcaaggtcgcgctcgctagactcgatgaaatttcgcttctgcagaaggcagctagtgagcgcagtaagttctccgaacggttggttgggatcgtaagccacgatctgcgcaaccccctcagtgctatccgaatgggcgtagacatccttacgatgggcgaaacggatccgagccgcttacgcacttccgaacggatcaataattcagtggatcgggcacttgaccttgttgagaacttgttagactttaccttgaccgaaagcggtcgcccaattccgatgaacctcaagcccatggagctccaccagtctgtatgtgcggcagtggaggagctaagatggacgtttccgaaggcggtaatccagcaccacgcggcgggggtgggggcggtcgtggcggactctacccagctcacgcgcgcgctgggaaacttggtagccaacgccaaccgttatggcgataggtccaaagcagttgaagttagatctgaagtagaaggcggatgggcacgcattcaggtggtcaatgaggggcctgtcatttcgcaggagctaatctcgaagatgttccagccaatggagcgtggttccaccgatgagggcggaggcgtcggattggggctttacattgtagagcagattgcccggttgcatggcggccaagccactgtctcctcctcaccgagggatggaacttgcgtcagcatcctgtttcctgccaacccacaacaggcgggggggaatgcttga

SEQ ID NO: 535609 - DNA, 1371 bp, Stenotrophomonas maltophilia
atgcacctgcctgatctttggcgcacgacgccctttcgcctgtcactcttgcatggtgtgacgtttgccgctgcgttgctgctgacgatgggcgcggtttacattcaggtgggtgcattcatgacgcagatgttagatcacgtcatcagtgacgaggcgcaaggcttgatcgagggtgacccggagcttctcgaagctcgagtatccattctggggcagaaccggggtgcgggatactacggtctgtatgatccaactggtacccaaagattggcaggcaacctcgactggcatcctgtcggtcaatcaatgggtgcccgccctcaagatctcccaccagcagagcgctcccctgccagtcgcgccatcgtgacccaagtcgcagacgggcggatcctgctggttggccgcgatccacgcatcctgcgaggcatgcagggcatcattctgaacacactgatggtcgcggcccttctggtaatctttttcgctgcggtactggcttggctccttgctcgtcttccccttaagcgcatagcagccgttcgcgcggccgctggcgaggcgcttgcgggcgggcgtggaatcagaatacccgttgccgggcggggcgatgaaattgacgcccttgctgcgttagccaacagtatgctcgatgacagtgagcggcttttggaggatgtaaaaggtgttgccgaccagttggcgcatgatctacggaccccactcacacggatcaggctcaatctgtaccgcgctctacatgaggcacgagaagggctcgtcgaggcacaggttgtagagcgcgcgctggccgacatcgagattctcctccgccgatttcgggccatactaagaatcggggagattgagcgtcgagcgcggtatgcgggatttggcgatgtcgacctacgcggcctattgggacagatgcaggacctgtacgggccagtcgccgaggagcgttgcatgcacctcaagcttgagacatgtggccccctcgtcattcacgctgatcgtgagctgctcgccgaggctatcggcaatcttgtggaaaacgcattcaagtacgggccctccggcggtatcgtgacgatgcgacttgcagtgaccgacgggcgcgtcctgatcgaagtaactgatgaaggacctggcattccattacagatgcaacagcgcgtgatgagaaggttcgaacgactgggcacgattcctggcgtggacgggactggtgtgggattgagcatcgttcttgccatcgtgcgacttcatggaatgtcactcaagctagaagacgcgaggcccggtttgcgagcggtaatctcactggccatgccctccccgggaaatttgggctatgagacgcactaa

SEQ ID NO: 535610 - DNA, 723 bp, Stenotrophomonas maltophilia
atgcataattcattcacccttcccatccgtccattgccggtggctaagatactcatcattgaagacgacctggccactgcggagggcatcgctgcggcgctgctggaggtcgggctggagccggacattgtaggagatggccgccttgggctggagcgtgcgctgagcggaaactaccacgccattaccctagatcggatgctgccggaaatggatggggtttcggtggttgccgcattgcgcagcgctggttgccaatcaccggttctcatgctcagcgccctgggcgaggtcgacgacaggatcgccggactgcgggcgggcggcgatgactacctaatcaagccgttcgacccgcaggagctcgctgcgcgcgtggaggtcctgcttcgacgtcaacggcgcaccgataaaggggggcgattggtcaagtcgggaatcctggaacttgatttggtttcacgggaagtcacgcttagggggcattccatctctttgcaagaaacagagtcgaaattgctggaatttctcatgcgtaactcgggacagctattaactcgggccatgatctttgaggcagtgtggggctatcgattcgatcccggcaccaacgtgatcgacgtgcacctcgcccggctgaggaggaagttggaagctgctggcgctggcccgctgatccacacagtacgtggcgctggatttcgtcttgatgcacctgcctga

SEQ ID NO: 535611 - DNA, 1434 bp, Stenotrophomonas maltophilia
atgcagtcactaaagcccttgcgcaacctgatcgctgcgacgtgtatagcctgtctgtccggttgcgcttccatggccccgcaacttaacctgccgacggaagcggttccggcacgcctagttgtagaaccacaaagctcgcggcctgccgtgcctcttcgcctgccacaatggagacagctgatcgctgatcctcgcttgcttgacgtggtggccttggcgttgagcaacaatcgagacctgagagctgctttattaaacgtccagtcagcgcgagcaaatctggacattcaggctgcgtcagccctaccgtcagtgaatggcagtgccggagtgtcgcggcagaggacgggggactcggcctcttcgattgacggaggagtcgagcaaagtgcgacagcacaagttcaggtcagcgcttgggaactggatctgtttggccgaatccgaagcctgaaggatcaaacgcttcagagctggttgtcgaccacgatggcggccgagagcgcccgcatggtactggtcgcatcaacagccgatgcctggatctccacggccgccgcacataccgcgcttgcgctgtcgctacgtaacgaggccgcgcatgcggaaacggtgagcctcacccggatgctgaagcagcgtggagcggcctccttggttgatgtggcggctgcggaagctgcgcaggcatcggctagggaagcggtgggggcagcccggacgcagctggaccgggcgaccagctccctggagctgctagtcggacaaccggttccggaagcccttctacccctggacggcctgaatgatgaggccgtgctgctggcagacctacccgacgcgatcgattcccgtgtgctactacagcgcccggacgtggccctggccgagcatgatctgcgcgcagccaatgcgaatatcggggcggcgcgggcggcctttttccccaccatttcgctaactgcttcgaccggccactccagtggccagttggattcgctctttaccgggggcgccagtcgtacttggtccttcctgccgaccgttaccatcccgctgttcaacgcaggcaagttgcgtgcggagctagacgtggcagaactgacacgcgacattcgagtggcccagtacgagaagtcgatccagctcgccttctcggaagtggcggcacaacttgccgatcgacgcttcctgaacgcgcgcctaattgcccaaggagacgccgtggcagcggcccgcacagcggtgacattggctaagtcccggcgccgccttgggctaggcagctcactccaccttcttgttgcacagcgcgacttggtgctggccgaggagaagctacttacgttgcggcaactcgacgcaagcaacaggatcatgctctacaaggtattaggcgtagacgcaagcgcggacctcaatcatgcataa

SEQ ID NO: 535612 - DNA, 3150 bp, Stenotrophomonas maltophilia
gtgaacgcggtcgctcgatacttcattgaccgccccatttttgcttgggtcgtggcgattacgatcagcctagccgggatactggcgatcgtgcgcctgccgctggaacagtaccccgatattgctccaccctcggtcacgatcaaggccagctataccggcgccgccgccggcaccgtggaaaacgcggtggtccaggtaatcgaggagcagatgaccggtttggaccatctactgtacatgacctccagcagcagctcgtccggcagcgcgcaggtgacgcttaccttcgaatctggggccgatcccaatacggcccaagttcaggttcagaacaagctacagtcggctatggcgctgttgcccgaggctgttcagcgcaatggagtgactgtcacgaagtcctccggcgtgacgttcatgatgctcgccttcagcaccgatgatgggaatatcgatgaagtagacattggcgacttcattgcctcggtgattcaaggccccatcagtcgcgtgcccggcgtgggcaatgtgaaggtgatgggcggcgaatacgcgatgcgcgtctggctcgatccacagggcttgcgcggggcaggcttgatgccgtctgatgttactgcggcaattcttgctcagaacgccgacgtctcttccggtgagctgggcgctgctcctgcggtaaacgaccaactcctgaatgcaaccatcacaagccgcagccggttaaaaaccccccagcagttccgcgacatcattctgaaggctgactcccaaggcggaacggttcgccttggcgacgtggcgcgggttgagatgggcagtgaccagtacgcagtgacggcgcgcttcaacggcaagccgtcggctgccctacagctggaactggccagtggtgccaattcactggctgtatccaacgccgtcctagcgaagctggaagaactaaaaccccatttcccatccggaatggtctacgacgcaacctacgacatcaccccgtttgtaaagatatccatcaaggaggtcatcaaaaccttgatcgaggcggtgattctcgtcgtcctgatcatgtacctattccttcagaacggtagagcgacgctgatacctgcgctggccgtgcctgtggtattgctgggtacgtgcggcgtgcttgcggtgatgggttacagcatcaatacgctgaccatgttcgcgatggtgctcgcgatcggacttctggtcgatgacgcaatcgtcgtggtcgagaacgtagagcggatgatggccgaaaagggcctagaccctcgagaggcaacgcggcagtccatgacacagattaccggcgcgctcgtcggtatcgctctcgtccttaccgcagtgttcctgcccatggcgggcttcggcggcgccacgggcattatttatcggcagttctcagtgactattgctgctgccatgctgctctccctattggtcgccgtcgtcttcaccccagcgttgtgcgcaaccttgctgaagccacatgccaaacacgcaaagaaggcccgtagtcgttgggcgggtcgtttcttccagtggttcaacgagcggtttgatcgtagtagccaacgctaccgtagtgctctgggatcggtaatctctcgcccagcttggtcgattcttgtgtatttggcagttttggtgggtacggcgctgctgtttgttcgtctaccgtcctcgtttgtgcccaatgaggaccggggagtgctcaaggttgaagtcgtgctgcccccaggatcaaccaagcagcagacccagaaggtgatggatggcgtggctgcgtttgtcggcgaacagccggagatcgcctcggtcctggcgctcagtggtatgggcgtgggtgatgcaggagggcagaattcggccatggcctacgtcaagctggtgccgtggcccgatcgggatagcacctcgcaggaggtgggtgcgcgcatcaccagtgaactggcaggcgcctacgatgcgaatgtcttcgcggttgtcccgtctgcgattcccggtcttggccaaagcgctgggttctcgctgcaacttcaggatatgggcggcactgggcacgaggccttcgccgacgctcgcgagcgcttcttggcattggcagcgcaaagtccaaagctgcaaaacgttcgctactccagtttgcaggatgcaccgacgctggcgcttcgtactgatgacgcgaaggcagcggctctgggcgtttcggttgctgacatcaatgccacgcttgccaccgccatgggtgggcaatatgtaaacgacttcatccacaacaaccgtatcaagaaggtctatgttcaaggtgaagctgcagcacggatgctgccacaggacctgcttgagtggtcagttcgcaacagctcatcgacgatggtgccgttcggtgcttttgccagtagcagttggacagtggctccagcggcgctgagccgcttcaacggcttgtcgtccatggaaatatcgggagagcctgcgccggggataagtagcggcgaggccatgctggaggtggagcgacttgtggctcagctcccccagggctacggcgtagcatgggcgggcctgtcatatcaggaacggttgtctggcaaccaagcccccatgctgtatgccatttcgctgctgttcgtgttcctatgcctggcagccctgtacgagagctggaccatcccggtgtcggtcatgcttgctgtgccggtgggcgttttgggcgcggtattggctacctctgcacggggcctttccaatgatgtgttcttccaagtcgggctgcttaccgtcgtcgggttggctgccaagaacggcattcttattgtggagtttgcgcgcgagctggaacgacaaggcgcaacgctgctggaagcgacgctggaggctgcacggcagcggctgcgtcctattttaatgacgtctgcggcgttcatgctgggcatcgttcccctggtcatcagcaccggcgccgggtcgggtagccgccacgctctcggaaccggcgttttgggcggaacgcttgtctcaacgctgctgggaatctttgtagtgccgctgttctatgtcctgattcgcaaggtgacggcacgccgagcgagggatcgcagtccaaccacccacctcagggagaaatag

SEQ ID NO: 535613 - DNA, 1065 bp, Stenotrophomonas maltophilia
atgggagtcaccactcggccgctggaaatggttcagcatctgcaaggtcgtacggtcgcggcgatggtctcagacgtaaggccgcaggttgatggaatcgtcttggcgcgtaagttccgcgagggtgatcaagtcagtgctggcgaacttctcttccaaatcgaccctacgccctataaagccgctgtcgacaacgcccaagcggcgctcgcgcaagcccaagccgccctgctgtcctctaagccccaggcattacgttatcgggagctggttgatcttgaggcgatcagccgccaggaagcggaggttgctcaggcgacctaccagcagaacgaggcagccgtggcgatggccgaggccgcattgcgccaagcgaaggtcaatctcgagcgcacccaggtacgcgcccccatttccgggcaggtcgatgcatccctcgtaacgccaggtgcgctggtgacgaccggtcaagcgcagccattggcgaccattcgccagatggacccgatgctggtagacctgacccagagcagtgttgcgttgctggccttcaagcgccgttttggcggcgacgacgcggctcccgaagcgcaggctcccgtgaagctgaccttggaggacggttcagcctatgtccacgtcggtgccctccgcttcaccggatcctcggtagatccgacaaccggggacgtcctgttacgagctgagttcccaaacccggagcacctgttgctgccgggtatgttcgttcgcggcaccattgcaggtggcgcgccgacagattccatcttggtgccgcagtccgccatcgggcgtgatgctcggggccgggggctggcccgtgtcgtcgatgagcagaacagaattcaatccaaggtcgtggtgactggctcggcacacggcaacctctgggaaatccagtccggactcaagactggtgaccgactggtactgtctggtgcagatggcctgactgctggccaggttgtgcaaccggtaatgatggcccccaagttggtcgttccacgggcaaccccggatggcgcggagagggaatctccgtga

SEQ ID NO: 535614 - DNA, 915 bp, Stenotrophomonas maltophilia
atgaaaagttcccgacgcttcgatcctcgatcgcttgacgaggttaaaaagtcgccccaaagcgctcttcttctgctcaacgagcgcgctaggcgaggggcggatttagctgcgcttgcacggcgactgctcgccgagcatggcattagatcagtagagccgagcgcagggcagtcgtttcaggatgccattcgcgagcacggcgaggcagtgtgctgcgtcatcgtcgggggcggtgacggcacgctcaatggatgcgtggaggcggtagcagccttaggcaagccactgggaattttgccgctcggcaccgccaatgacttcgctcgaagcatgcgcattccacctaagctctctgccgcagtggactgcatcattaacggtaaggcggtcccggtggatatcgggctagcaaacggtctgccatacctcaatgtcgccagcgttggctttagcgctgaactaagtgcatcgttgactgccagcagcaagaagcgctggggtaaaattgggtatgcgattaatgctgcccggttgttagcgaaatcgcgtctattctccgctaccattcagcacgatggtcgcacagaacgcttcaggacgttccaagtatcagttggaaatgggcgattttacggtggtggtatgacggtgcaccagtccgcttcgcctacggacgggatgctggatgtctacagccttgagctgagccactggtggaagatgctggcgctgttgccggcacttcggcgaggtacacatggagcacggagggaagtgcggtcattttcttccaaggcgctcacgctgcacgcacgtcgacgcttgcccgtgaatctcgatggagaactccggacttacacgcccgtgcatttcttgatacgtgaaaaggcactgctcgtctacgcgccctga

SEQ ID NO: 535615 - DNA, 1506 bp, Stenotrophomonas maltophilia
atggtaaatcggcttagagcagcatttaactacttcaatcaagcggtgcccttcaaactgccccaggccttgatcacgacggcggtacttgtcgtcctgctcctgctgccgtgcccggagggtctgacgcccaaggcgtggggactggtcgcaatcttcctgaccacgatcgtcgccatcatcctcaaagtgatgcccattggcgtaatggccatgatggccattgtcatcatcgcgctttcccaagtcacttcgagcagctcaaagggggcgatcaccgatgcgctctcaagcttctcgagccctctgatctggctgatcgtggtcgcgattctgatttcgcgtggcctgaaaaagacaggcctggggagccgcatcggcatgatgtttatcgcgctactcggcaaacggacgcttggcattggctacggcctcacgatttgcgagctcgtgctggcgccctttacacccagcaatacggcccgcggcggcggcatcgtccaccccatcatgaagtcaatcgccaactccttcggctctgatccggccaagggcacccaaggcaaggtcggcacctacctggcattggttaactaccatgccaatcccatcacgtcggccatgttcctcaccgccactgcacccaatccgctggtcgtggactatgtagccaaagcgacgaaccaacagctgcacttgtcttggacgacatgggcatcatgcatgctgctgccgggactaatctgcctaatcatcatgccattggtcatttacctgctgtcgcccccggagctgaaaatcacgcccaatgcggttgaattcgccaagggcgagttgaagaagatgggagctcttgcgccgaaggaaaaggtgatgatcgggaccttcggcttgctcctggtcctttgggccaacgtccccgctatgctgttcggccacgcgtggacattggaccccactgtcgtggcattcgtcggcttgttcgtgctgatcatcaccggtaccctggactgggacgacgtgctctctgagaagagcgcctgggacacgctggtatggtttggcgcgctggtaatgatggccgagcaactcaacaacctgggcgtgattggctggttcaccgaggccatgaagggcgccatcatcgccagtggcatgggatggcagatgatcgccggcagccttgtcctagcctttgtcttctcccattacctgttcgccagcacaaccgcgcatatcagtgcgatgttgcttgccttcctgggggtgggggcattgctcataccgcccaactacgttgttcccttcatgctcatgatgacggccggctcggcgataatgatgacgctgacccactacgccacgggcacctcgccgatcatctttgggagcggctacatcaccttaggcacttggtggaaggtcggtcttatcatgtgcttgatcgaactgctgatcttcgcgcttgtggggagtgtttggtggaaagctatcggcgtttggtag

SEQ ID NO: 535616 - DNA, 264 bp, Stenotrophomonas maltophilia
atgatccttatctatccaaaaaagaacgagccgccattccacctctatgtatcaggcggtttcgttgaggtccagccgaatcaggtgaccgttctggccgacttggcgctccggagcgaagatcaggacaaagcgaaggccgaggttgcgagggatgcagccaactctcctatggcgacgtattttactgatgacgcttacgctcagatgcacaccgagctcatgcatcatttcggggcaaacttgcgtggcaaatgctggtga

SEQ ID NO: 535617 - DNA, 780 bp, Stenotrophomonas maltophilia
atgaagcttggtggaaaaatcgcactcgttaccggcgctgcgcaggggattggccgcgctatcgcgctccggctggcacaagagggagccgacatcgccctgattgatattagtacggaccgacttcaggccgtggccaatgaagttcagtcgattggacgaaaggcaactgttttcactgctgatgtcggcgatcgagatcaggtttttgcggcggtgaggcgtgccaaagaagaactgggcggttttgacataatggtcaacaacgcgggcatttcccaggtcaagtcacttgccgatgtgactcaagccgacatggaaaagatctatcgtatcaatgttcaaggcacgctttgggggattcaagccgccgcagagcagttcaaagcgctgggtcacagcggcaagatcatcaatgcgagttcgatcgctgggcatgaaggctacgcgcttcttggcgtgtactcgtccacgaagtttgcggtacgcgcgctgacacaagccgctgcaaaggaattggcagtccacggcatcaccgttaacgcctactgtccaggtgtcgtcggcaccgacatgtgggtagatatcgatcagcgcatggctgagattacaggagcaccgattggggcaacctatgacaaattcgttaaaggcatcgcgctgggtcgagcagaaacgccggaggatgtagcggcgttcgttgcctacctggccggcccggactccgactatatgacagggcaagctcctttgattgacggtgggatcgtgtttaggtaa

SEQ ID NO: 535618 - DNA, 1074 bp, Stenotrophomonas maltophilia
atggtgccatcgcagctccctaagttcttaaagctgggcttcaccattgcgatggagcgaggagccggtgatgctgcaaaattccgtgacatcgactacgaggatgtcgagtttttcgacgacccgaagcagatggtagcgaaagcagacatcgtgctctcagtgcagccagcctcacccgagttggtcgccgcgatgcgacctggcgcgtggctgatgtgcatggtgtatccgcagaaggttccgaagctcttgtcggtcttgcgggatggccacatatcttgcttggcattggagtcggtgccgcgcataagccgggcgcaggctatggatgtgttatccagccaagccgcgctcgcagggtatctggcgccgatgattggagccactcacctgccgcgtattcttccaatgatgaccactgcggtgggttcgctgcgtgccgggcgagttctggtgatgggactaggcgtggccgggctgcaagccttggcaaccgcgcgccgccttggggctatcacggaaggctatgacgtgcgtcccgagaccagagagcaagcgcaatcggtaggcgcgaagttcgttgagaccggaatcgatgcgcgcggtgaaggcggttacgcccgcgagctgacagccgccgaacaaagccgagcgggtgaggtgctgaccaagcacatccagcaggccgatatgatcatcaccaccgccaatgtgcctggcaggcgtgcgcctgtgcttatcaccaaagcccagatcgaaggaatgaagtctgggtcggtcatcgttgatcttgccgctgacagtggctgcaactgtgaaggggcgctggccggaggcgaggtcgaaatcggcccggctacggtgatcgcgcctttcaatgtgccctctcagttgcctcaacactccagcgagctttactgccgcaacctattggcattacttgcgctcatcgtcaaggatggcgcgattgcgccggatgtggatgacgaggtgattgctggaacgttgttgtcccatggcggaaaaatcctcccggctgcggctatcgcgctccttgaaaatgaggtctga

SEQ ID NO: 535619 - DNA, 159 bp, Stenotrophomonas maltophilia
atgaccttgacacggtttgtcgcttccctacaaccgggctggtgttcgggcagccccttggagagtggcggttgcctgatcgagggcggtccgttcgtggttgaggatgcgccgctgcaaaagctcaaagaagaggacatcgtggtgcgcccaacatga

SEQ ID NO: 535620 - DNA, 174 bp, Stenotrophomonas maltophilia
atggcgaattgccaaagagagtgcatcgtcatgactgagataaagcgccagggcgtcctcaacgcttgcttctgccacaaaggcccatgtcacacgttgcgcccaccatcgccaaagttcgatgagtgtttcgaacgcatgggtctctgtacgctcgccgatgacaccaagtga

SEQ ID NO: 535621 - DNA, 786 bp, Stenotrophomonas maltophilia
atggcgactgtaacagaggctatcgggcttctcacaaagaccaagtatgcgccgtccgacatcgcgctatcccatctctatgagaagatggtttccgagccccttattgatgatgaaacaggagtgactgtcgcggcggtgagacgctctggcgcccctcacttccgaaggttgggcagcgcgcctccgctcacagagctgccaaagaaaagagacagcgctagacacaatgaccttatcgccgacttccttgccgagcttgataagccggctcggagatttcgtatctttacccgtgttttttcgtctaacggggatgagagcccggatgaccagactctctttgctctagaagagaagcacgacttttcatggtttagcgagcaacatatacgatttgacgactacacctatattcgaccagacatatgcggccggagccgcagtcgcatcgcgcccattgccagcgaccctagcgtcatcatcgaagtcgtggattcgcactttcctgaaccttcaacgctcgtaaagctctttgcattgtcccggatggcatatcacatttattttttcgtcattggcgagttccccgtacctcacgcccaaaaactaaacaagtatacaaaggcaaaaaatggaccgttcgagcttcgcatcacgtgggctctcatgggaggtgagcttatgcggaacggagtgattcaaaacctctcatctattgatcccatgcagcgagccctggaagcattgaatcttatcaaagcatattgcaagaagtcgcgatga

SEQ ID NO: 535622 - DNA, 813 bp, Stenotrophomonas maltophilia
atgaactacgccgtctttgaacaatgccattgcacgcctgatcgtctgcctttcctcacgggatttagggtcggtatgccatcgctcgcccggacctcctgcacgcatggcaacactctaaggtcgcccgcggcccgctgtatagccaacgatcagttcgatacgcctgtacgggccgtcagacggcgtgacctcgcggcgctcattaagatgcttgaccaattgcatgaggctgcccgctgtgatcgggcgttaaccaatgcttgcgaggcggggtttttggagggcgttaagctgttgtatagccgcgcgagctcctcttggcagagcggccatgcttttatgttggccgcaaaaaatggtcatacgcgcgtggccttatttctctttcgcacaaaattgccagatgtcctttgccattgcgaatgcggtgcatcaatcgcatcatcctgggggcatatcgaaaccgcgaaggcgcttatccgtggcgcgttatcagaatggccagatgatcaatccgtcctttcaaacttcatttccgttgcggctatagtaggcgacgctcgcttagttcggacacttctagacaagacaccaagccttgatgcgacatgcgccatgcgtctgccgctgctatacgggcattgggagtgtgcctcgttaatgtggaattacctaacagaaaacggtcgacaagacgctcaacgaaaatatgggcaagagacggctcagatgatcgcgtggcgagagcgctccgctttgttgcaaagcactgttgacgtgtcaatcaataagcctagccgcaggctctga

SEQ ID NO: 535623 - DNA, 261 bp, Stenotrophomonas maltophilia
atggtgggcgttttgttccttgggaaaaagagccggctctcgtcccaaggcaaagccatagcggctgcccacgctctattggacagtgccaaaggccgcttggacgcgaaggcagcgggcaggcgcctgcgtgagcaagtcgggctcaagtggtccttcctgacttgcatccaatacctgtcagggcagaaggcgttggtcgcgctcaaggcgatgccaaacgactggatggagaacggccgtatgaagctcgacccttag

SEQ ID NO: 535624 - DNA, 495 bp, Stenotrophomonas maltophilia
atgagatcgactgtgactacctcactagccgcaaagatcgtgggtattggctacgaaggcctacgcagctacctgaagcgcggcctgctgggcagcagcggcgtcatgcctccgttcgtgggaaaggacgtgcccgcgccagacctgagcgtcgttcgagcgacatggaagcgcttcggcttcacggatctttgcctcatttatctagctaagcagctgatagacatgggtcttacgttcgaccaggccaactcgatagtctccaatcacaaaatgcgccccctattccaggaaggagcttccaagaaagacgcgttagtgatgtgctggccgccataccatcagtacatcgtgttcaaaggcgaagagcgacgacacttggccgatcggctggatgaaacggacggaacagccatcctgattgagctgaacgcaattgcaaaaactgtcacttccaagttgctggaaaccgaaggtgaagcacaggcctcttga

SEQ ID NO: 535625 - DNA, 1521 bp, Stenotrophomonas maltophilia
atggccaaagctctctaccttattccggacacgaatgtcctactccagtgccgatcgttccatgagctcgactggtcatcgttgttggaccgagtcaccgagatcactttggtcctggtcactcccgtcgtccgtgagaccgaccggcaaaaaggtgggcaggggcgtttggcgaatcgcgctcgtaaggtcaacagttggatcggaggtctgttggaccaagatgcaattgagatcaggcctgcatcgcccgggcctgcggtgaggctgatatcagctgatgcatttaagcccgaccccgacttaagtggtgaactcgactacgcccacccagacgactcgatcgtggggaccgtgtctgctttccgaaaagcgcattcgggtgaggaggttgcccttctgtcacgtgacaacgctgttctccttgccgccaaacgttccggggtccccttttacaaggtgcctgaagactggctcttacccgcggaaacgaacgaggatcaaaagcggatcaaagcgttagagaacgagcttgcgcgtgtgatgaaagcggagcccaactgtctcgtcgaggcagtcgagagtccgtgggagtttgagatgcactgttacgagccacttcaagaagaacaggtagcaaacttgttagacaggctgcgatcgcaatggccctgtgagaccgaattcggccctaaagagatggctgcgcgcgttccaacgcttggactcgcgcttgctaacctacgcgaggagttcaggccggccagccaggagacgattgatcattacaagaactcaacttatccaggttggctgaggaagtgcgaagaggtatggcggactctgcactctgagctcaacgaccgagaagcgtcgccacgtgttgagttcacgctaagaaacgacggatcgagaccggcggaggatgtcagcgtcgacatatcgcttaagggcaaaggttggatgctatcgctggttcaggctgacgaggaagagaagacaatggatcttggctccggcgcgacgcttcgcatggggtctggacagcggggcgtgagattgccacctctgccaaaagcgccaaagggcggttggatcaagcgaagcctgttcccgcatcaagccgcgacgatggcaagtgttgaggcgacaaggctcttgcgtgacttagagccgatcagtgcccgcctagggcctccacctcagcgcgaaactgataccttttattggaagccaggcactcggccgacacatccgcgcccaagcacgtcgctaacttgctcacaattccgacatcaatctcgccccgaagtattcgagttcaatgtggtaatactcggtgagcgggcaccgggccaagtgaaaggggcgctaagtgtcgaggttcatgcggcaaaccttggtacgcccgttgttgcgacattccccattgagatcacagtggtccctgccgacacgtacgctgaggcacaggcgcttctggagcttctctcgaccaaggggctcggcgcggccacttga

SEQ ID NO: 535626 - DNA, 864 bp, Stenotrophomonas maltophilia
atgattgactctacgcctgctgatccactgcaagttccccagcgggaggtgcagcggctcttgggtcggtgccttcttcgcattcagcagtacgagcggttgatcaaagccatcgtggcgcaccatgagatctgtggacccatatcgtccctggacgccatccggtccgctcgtactgctgatgcgtcaacaaagagcctagggctcttggtcgggaaacttgtagggtcctatttggtccatggcgctgggcgcgacaccgacctgcccgatcctgattctggcgaggtcgcaacggttcgaatgcaactccggcttgaaatgggcgctgaggagttcgcgcgcacccaagcgggcctgaaagatctggtaaggctccggaacgacttggtccaccacttcatcgaccagcacgacatttggactgtgccgggctgcgcgcgtgccgagcaggcgttgctcacctcctactctcatattgatcatcatttcgaacagttgcgtagctgggccgagcacatggagcaagcgcgccagcttgctgccgagttcgtccagtctgagatcttccgcgacttggtgatcaacggtatcccccccgatagctcaatcgactggccacgctcaggaatcgttcgacttctccgggaagcgatgtccgaactgtccgtggatggttggacggccattgccgccgcgcagcgatacattcaggcgtgcgagcccgatcagctgccggagaagtacggatgccgcactttcaagcagatcgtgcaccaatcccgtttattcgatcttcaatacagggagcgagacggtaggcgtgaggcccattttagagatcgtgcagagccacgaggctga

SEQ ID NO: 535627 - DNA, 1131 bp, Stenotrophomonas maltophilia
atgaaggtttttatcagttcacttatcagcgggatggaggccgagcgagcggtggttaggcgagcactgtcgacgctccggcaccaagcggtgatggccgaagacttccctgtgcagtccaactcgccccagatcgcctgcctcaccggactgcggcaggccgatctcgtgatcctggtcctcggtccgcgctacggcgcgaaacaggcatcaggtctatccgcgacccacgaagaggtgcgggaggcgttaggccgcaagtcgctgatggtatttctaaaggccggggtagagctcgagaccgagcaacaggctttactgaatgagcttggcacgtgggaagcggggcttttccgtgctcactttgagacgctcgaagagctttccgacaaggtggttcaagcggttcacgattacgatttggccaatgcagttggcccgtttaaccccgatgccttgctcgctcgggcactgacactttgtagaggcgagacgaaccagcgcatgagtgggaacgcgttggaggtggtgcttgcgctcgggcccgagcaaagcatcctccgcccagcccagatggatgcgtccacgcttggcgaggagatcaagcagcgcgccatgtttgccaacccgcgcattctgagttctgagcacggcgcgcgcgcgaccatgagaggggatgccttggtgctgcttcaagaacggcacggccacggggacgccaaaatcgctctctggcctacgggagacatccaaatgcgcctgcccattccccctgcggctggcagcatgggttcaatggtgctcttagaggaggaggtcaaagatcgactcaccgcatcattgacttttgccaactggttgctatcgcacgtcgatcccactgagagactgacgcatttggttgtcgcggtacggatcgctggcaacgatggcgcttcttggcgaaccagcgccgagcatcagcagagtcttcagtccatgtccatggtcatgcgatggggtgaaacgccagcgcccgtcacgctaaggcccgcgcatcaccagcgcgcagtccttcgcgttcaactccactctttggtggacgatttgcttgtcttactccggcgccaatggtcttctcaaagcgcttga

SEQ ID NO: 535628 - DNA, 870 bp, Stenotrophomonas maltophilia
atgaccatcgaacacacacgcatcaaaacttatagccgggccaaagggcattctgcgatcgcagccgctgcttacaggggcggttttctgcttattgaccccaaatcaggcatcaagcacgactaccgcgggcgacaggggatcatccatgcgcgctgcttgggtcccgcaggatcccctgcctgggtcaatgacccacagcggctttggtcggcagctgaggcggcagagcggcgccggaacagcaccgtttgccgtgatttcactattgccctgccgcacgagcttgatgaccgcgaacggtgggaccttgttctcgatatttcgcaggggctgatcgagcggtacggctttgcgttacaagcgagccatcatcgccctacgaaggacgatcctcgctacttctacgcccatctcttggccacgaccaggcgcatggaagcttctggcctcgcagccaagacacgtgtcctagacgggcgaatcaatggctacggcgaggtgctttggatccgtggcatgatctctcaacgcatcaatgggtatctggggttgggcccggcccaggttaagccaaatcccgagaatctggctaagcggcttgagttgcgtcgtgcagggaacaattttggcgacgggcgtgccaactttgagcatctcttggggcgctaccggaaagaaggaaagctcctgcccgtcccagaagggcacacggccgagcgtgcgaggtccgaactgcgaggagtggcgagacctagcgccgatcatgagggcattgaggcactcccggtgccgcccagtgagctgcctagcgaggttctacagtcctatatccaggtaggggaagacctaccgcgcaacgcggggtaa

SEQ ID NO: 535629 - DNA, 210 bp, Stenotrophomonas maltophilia
atgaaacaatactcgacccactcacggatgctcctggacgagcaggaagttcaactccgccacgatcacgtggaagcttgggttgcagctcaacgcgccgctggctttggcttagacgaacatatggccaatgcgctccatgcctatctggatggtgttgtggaactgcctgagttgttgtcagagctgcgtagaccttacttgcactga

SEQ ID NO: 535630 - DNA, 393 bp, Stenotrophomonas maltophilia
atgactgttggcacgttcctcctcttgctcgttcttgccaccggcgccctcgtcgcactcggtgtgacgaggagcctcaagtcgcgcggcaaccgcgcagcattcgcagcggagttcgagcatttctatttccacagcaacagcgccctggccctctctgtggcgcgttcccgaatcaagctccgcacgactcaggcaacgaagatctatccgctgaacgatgtccgttcgtgggaaaagcactggcacaactccaagcgccagggcacgctgacgcttagcgttcgcgatgctgatcaccccgtgtggacaatcaggttctaccgagagagtgacatgaatcgctggtatgagctgttgaaccaagcaatcaatgatggagcgacgctgtag

SEQ ID NO: 535631 - DNA, 312 bp, Stenotrophomonas maltophilia
atgttcaagctccgtgtagccgtcgttggcgtgttgaccgcttgccttgtcgcttgctctggaagcggcccatctcatgacgaacgtcaaaacgccttcttgcagtacgttaaggacaacagcaacgacaaagcgaagatccgcgaattccagagcggcgaatgcgccaaagccgagagcacgccgagcttcaactgctccgtctcgagccaagtcatggcaatggagcgggatttcggccatgagatggatggcgtttacaccttcaccgaggtcggtggagcttggaagatcaccggcagggtccagtaa

SEQ ID NO: 535632 - DNA, 234 bp, Stenotrophomonas maltophilia
atgggactgccagaagatgtggccggggttcggatcaaccgctacgaacgcgcggtacacgattgcgacagcgagaccgcccagaagcttgcgagggctcttggcgtatctgtggcttatctttatgctgagaccgatgaactcgctgagctgattcaggccttttcaggcctgcccatcacggagcagcgagttattctggaagaactaagggcccgatcggcaaagccttag

SEQ ID NO: 535633 - DNA, 156 bp, Stenotrophomonas maltophilia
gtggaggaattagcccgcctcttgaattttcttagcaagcgcgacgatggcgtcccctgtttgcgctccgaacgcagtacctacaggaacatcgcgaagccagccgccttgaacggccgctttgacgacctcggccgcaatcttggttgcatctga

SEQ ID NO: 535634 - DNA, 864 bp, Stenotrophomonas maltophilia
atgctggtagacgacaacatccactttgctgatccccgcaccttcaatgatccgctagatgcaaagccgaatcttactcccgatctagacaatgccgggctcgaggagttgcttcttgagctcataaaagggcgcgtacgggaggagatgaaatccgcagccaaagccatacgctataaaggcccaaagacgattagccatattgcccggcagagtctaaaggcagcggagaaccgaatcgcaagtattcgctattcctccacagatcctgatctgaaaggaggagatccggttcagtggcttctggccgtcgagattgaggaggagcttcttcggatttatgaaagaggtctcttttccttggctgagcgcgcgacctgtccgctgatgtggagccactatggcgatcagcatcgagggatatgcttgggatactcggttcctgacagtaatgttggtgtcaagaagattcagtatggaggaagtcgtaccgtcctagctagcgatgtcgctgcaatgctgcaaggggatgaccttgctaaacagagggtcgatgacgccgttctgctccgcaaagcccgtccatggtcgtatgagcgtgagtggcgcttgatcggaaatcaaggagcgcagccatcaccgttggagcttgaagaggtcatctttggcatgcgctgtgatcctgcggtggtctatgcagtcattcaagcacttgctccgcggagtcgtcaggttcacttccacgagatcagggaacggcgcggtaagttcgtgctcaccaagcgtcgggttgatcttgatgaagttgcagtgtccagacctcaccgaagccgggacctattggaagacctcgacgatttttag

SEQ ID NO: 535635 - DNA, 1176 bp, Stenotrophomonas maltophilia
atggcatcaaggaagcaatcgggcggggctttgatcgtgggcgtcttggtcctgatcgccctcgttccgaaggaggtttggattaccctcggcgtcgtcgccttggtcggaaccttgttttatgcctactctcgctggcaatcgaataaggcgcccgccccggcggcagccacagaacaccagccgacattagcggaactgacccaaaccgttccgcgccgaaagcctctgccctcaacagtcaccaccccaccggccctggatggtggggacatggggccacaccccattgagcgtggaacaaaggccagcgggcgtacgacggaacgtgcgactttcggccacgtcgcctcatcgactcggcagctggtccagccagacgtggcgccggatgcaacagccccgcccaaaatcgacttggggaacctcgcggctgcgatgaccgcggtcactgaaagacaatctcaatcggcaggggccgatcgcgaggcgatgcgtagcattgctccggccaaggacaccctgggaaacctcaccatcgcgatgaaggctgtcgccgagcgccaggctaggtccgccgtcgctcgctctggatcttccggcaatgaggatcccttgatcatcgtgccctctttcactcggcctcgccccaaagaagaccatcagacgcccacagcttctgagactacaaaaagccaaactctgcaagtgacgggggcttcggccgtgccaattcccccaccgctcccagcagcgccacctcaggccgtaatggtcagcgcagcaccggggcaaggcgcaagccacgacgaactccaccggatagcgatgcccagcgaggagcagcggaaattcaccgtgccccgtccgcccgagggttgggcaaccacccgatgggtcggtcctgaggacagcatcgaaattgcgggcatcaccatccggggtggcttgttctatacaggggtgaagctccccaccaaatacgggggcaatgacccaagcttggtgaacgccgtcttggccgtctctcccacagggaacttccgtgttcaaactgtcgggcaccggctgagctatgccgagttctcgccaatggaacgacgcgtttacctcagctggctggcatccgatcgcactgaccctgaatgctcgtacggttgtgtacacgcgttttag

SEQ ID NO: 535636 - DNA, 921 bp, Stenotrophomonas maltophilia
atgagcgaaaaatatgtatttattgagttgacagcaaaaaatggcagcgtggcagtcagccggtccggcgtaatcgatgatgcagcaatttcggatctcgatccgcttgcagctgacgcgtatcgcgtgatcatgcttaagggacacggaggctctggtaagggagttccggcggaagcgtttcagagtgcctttgaggcgatccagagtgaggaggtcctagttgaagcgcgcagactgagcggtcttccgcagcatggggccctagtagaggttaattgggatggagcgggggccaagcttggcgtcggaaggttgcttgcgggatatgcaacgaggtccggtaagttcacgcgcagattgctgaaggccaagtcagctgggcggggccgaaagtggcttctggtcgaggctggttcttcaagccctaccgagattttttcccgtgaagcatcacttggtcaggaggactaccctgtcgcgcccgaaagctggtttccaccgccgccaaaggatagcgaagcctcaatgcttaggcgacgcaacctcattcgggaagaagggtggttgacggccgtggaggtggctgcccgtttgcactattcggataatagtgccaagcaggcggtatcaaagctcagacgtcagcataagctccttggcgcttgggtgagagacgagcgtgcgtttcggttccccaagttccagttcagtaaagcagagatccggcctgagataaggttgcttcttaatatccttcccgagggcaacggaaccggatgggctcaggtgcagtggctctattcgcgacactcgcagcttgatggagaaacgccaaggtccgtgatgctgcgtgatccagagcgggtgcttgcggtggctaaacgtcaattcaaggaagatgcgaatgctttctggtga

SEQ ID NO: 535637 - DNA, 678 bp, Stenotrophomonas maltophilia
atgctttctggtgagacttgggcggcgcgtaagatgctagcgccaaagatgtcgaccaatggggaatactggcacattttcaaagtgccccatgcgccgacggcctacaactccgtatctaaggctcgtttctcgttggcttcgaaaaatctctcgatgttttacgtaggcgacaccttaaatggcgtgctctgggagacggttctcagagatgtggagcccgatgacgccctgaatgtcgacatcgacgtttcaagtcttgctggaatgcgtgcagtgaagctgaggttgctagacgctgagctggccgttctggatcttcggcaacctggccttcgtggtgcaggatttggccctagtagtcgcgaggccgtcgaggttgcgagactaattgcgacaccatctcatgatgaaactcatgccgccgtggcaactctctttactgatctaatgaaagctggtgtggtggacatgcctgcgcttgcatgggtatcgcgccagcacagtggatcgaatgtctacctaagctatgagccgcctggttccccaagctcttgggagcaggtcggagacatcgtagcgttggatgatgataaaaacggccatcaacttatccatagagcgctggaagaggcgggctttcaatggtcgccggcactctacacagcggggacgtga

SEQ ID NO: 535638 - DNA, 771 bp, Stenotrophomonas maltophilia
atggatattgaagcggcgaggcccgtgtcgcgacccactgtcccggttcctgagacggagaagggcggcgagaagagcttgcggatgttgcccctcgtgcaagactgcttaagattcgccgaggcggctgtaacgggcggacgtcctcgatacccaaacaatgcaaggcttgccacgcttatggatgtcacgtggaacgggttggagctgatgctggctgggggcaggctgatctccaagcgtttggggctcgctttgctattaggcgtcgcgtttctcgtctatgtttctgtgatggaaggtgccgcaaggtggtcgttcacgccgctctccttcctttgtggggtagcgtgcgtcgttctgtccccgccgagccgggtcgcactgctggacgtgaaggagagcgcggttgaccgagttgctggcttcattggagagcggaaactcaatgaaaggtcactaaccacacttgaagccgcgcttgaggccgccttggccagaagcacggcatggaccggaaccttgcgcggcttcatggcgattgtgtgggcggtactcttctggttcttgtgcgagcgggtattcggtctagatatcaagccagagatcaggtccgatgggttggcttgggctgcggcaggttcgctagcactgcttgcgggtctcggtgcactggctgcttacagcgccgcagctagcgccatccatttcacccttcgccttgggttggcccaggcaaagattgacgtggtggcttctagtcaagtatga

SEQ ID NO: 535639 - DNA, 636 bp, Stenotrophomonas maltophilia
atgaccggcagcgcacgcgaactgttgaagtggctggccgtgatccttatgaccggggatcacgttgccaaggtgatctacggcgggtatgtgccaggtctcagcgaagcgggacgggttgcattcccgctgttcgcgctggtgatggcttacaacctcgcccagtccgatgccgatgtggtcaagtccgttcgcaggttggccatgtggggggctatcgcccaaccggtgcacgcgctggcattcggctactggttaccgctcaacatcctgctcgcgttcgcgctgtgtgcggccgccgtctattcggtcagccagcgccgatgggttgtcctggcattcgccgcggtggtgcttccggcattcgtggattaccactgggcgggcgtggcgttcgtgcttctggcatggtccgggttccgcacagcccgaccgctactcgtgctggccgggttcgttccgctatgcctgttcaacggcaacttgtgggccttggtggcgctgccggtggtcgcggcgctgtccggggtgcgctggcaccttccacgaggccggtgggcgttctactgctactacgtgggccatctggccgtgttatctgctgtggtagcctttgccgggagtttcagagcctga

SEQ ID NO: 535640 - DNA, 318 bp, Stenotrophomonas maltophilia
atgatggtctggacgtggatcattaagggcatcgtgctgcttgtcggcacgctgaaagatgcggcggcgggaatatttgcccgaatccttgccaccttcgggcttaccactgtcaccttcaacacgatactgccgaacctcaaggcattcgtgacgcagtggacaggcggcctcagtccgactgctaacgagttgcttggatacctcggcgtcggaaccgccatgtctatggtgctttcggctttggccgtgcgcatgacgtggaaggtcttcattgttcccaaggctgtggccgatcagctggggaactcgccatga

SEQ ID NO: 535641 - DNA, 1338 bp, Stenotrophomonas maltophilia
atgcgactgataaaactcgttccgggcgcagtcccggtgctcgttgcggtcatgttgatgcttgggccggtcggcgaggctaaggcggcatcagtagccgatgctttcgaatcgtgcaccaagaactttttgttcaacgcgtccaattcggccaagaagtgtgtagatttggggaagaactcacagggtgtttgccgcgtcggtttgcttgcgacggaatctggctatctcggattctggaactatgactgcgatcagacgtgcgataaggagccgagcaagaccacgcccttcttcccgccctccggttcagtgcgatgcgtgaatcactgtgaagtcacctaccgcgacaacggtgacgacaccaccacgtactcacccaacggcaagtcgtgccaggacaagccggattgcgataagcaaggcaagaacatggtctggaacgccatgcttggcgtgtgtcagcccgttcaacccgaatgcccgcaagggcaggtcaaggtcggcaatgcgtgcgagaaggagaagccttgcccggatggtatggcgctggttgcaggcagctgcaagaagaaggacgaagagtgtccgtctggcatgatccgcagcccttcgggccagtgcattccaggtgatggtcagtgtgcgtctggcgaggttcgcggcgcggatggcacctgcaagcgcgacaaggacggtgatggtaagccggatgacccggacggcagcgaaggcggtggcgacggcaagaacgattccttcgctggtggcgatagctgcaacgctccgccgtcgtgcaatgggtcgcccatcatgtgtggacaggctcgcatccagtggcgcatcgactgcaacacgcggcgcaacaacaacatcagcggtggtcactgctcgcaatcgggtatgccggtttgcacgggcgagaagtgcaatgcgatggagtatgccgggctgctgatgcagtggcggtcagcttgtgctctggaaaagatggcgggcaagaccgatacgccgggggcgaataatgccgacaagaacggcaacggtgtcgccgatgttctggaaggtgttggcgagcccgcgccaattggtgatggaacggcggaagtccaggcggcgaagaagtggggcattggcgtgaataccgggctgctcgacaccgggaacatgttcggtggtggcgcttgcccaacgccgcccacgttcaagctgatggggcagacgatcagcggcgctgacttcccatatttctgtcaagcggcagccattcttcgtgcagccattcagatctttgcggcgtacgcggcgcttcagatcctattggggaggttcttctaa

SEQ ID NO: 535642 - DNA, 222 bp, Stenotrophomonas maltophilia
atggccgcttcggatccgctgtatgtcgtgggttgtgctgcggagaacatccggcaggacggcacatgcgcggttccggtgtggatgccgtaccaccagcccattcttccaccccttgatgtggctgatggaacccttgtcgcggcggccatcgttggcgtttgggcaatcgggttgaaagcgcgtctcgtattccgcgcggcgcgtttaggggtctactga

SEQ ID NO: 535643 - DNA, 183 bp, Stenotrophomonas maltophilia
atgatcactgcacctccgaccttccaacttttccatgacttgatgagcaatgacatgggccttttttcggtcctcttgttcttcaatgtagttctcttgggcgtgctcctttcgatccttcttgagcatctctggctcgcgcttcggcattggatgcagcggcggaagggcgatgagtcatga

SEQ ID NO: 535644 - DNA, 588 bp, Stenotrophomonas maltophilia
atgacatttgacccattaggcaaccacacatcccagtctctaacatctacctcgcgaaagtccgtgtttttgaagctgaagcggccaagcggcttgatgacgcccacagagtgggatgcctatgagctcctgcagcactccgtagttatgaagaagtaccgctacttggcctttccacaggttcatttgatgcaagtggtcgacattgatgtacccggcttgctgttagagctcgccaggcgaaaagtgtggccggagtatatgaaaagagtggaatcggagattactaagcaatggcagtttatgacagggtggagatcgttggatttcttgatctgtgacaatgcgggcatggtcgttggctcgattgaaattgatgacccgaggcatagcgccgaccaagctaccattgcttctgacgcaatcaagaacatagtctttgcttccatcggtaagccactgcttagactcactaatgcccaggtgtccacgatccatgctcttccgcaatcacattggacgacagtagacaatgaactaagagtaagtcgtcagtcttggaactcgtttgttggttctcttaagtga

SEQ ID NO: 535645 - DNA, 984 bp, Stenotrophomonas maltophilia
atgagcatcagcatcaacgacgtcgcacgcgtggcgggggtctccaaatccacggtgtcacgggtgctcggcggcggtccggtcagcgaggacgtgcgcggcagggtcgagctggcgatccgccagaccggctatcgacccaacctgcaggccaggcgactgcgctcccggcacaccggcatcatcggcctgatcgtcgcggacatccgcaatcccttcttcacggcgctgatccgcgcagtggaggaggtggcctatcgcgaaggattgcgcgtgaccctctgcaacaccgacgaggacccggagcgggaggcgctgtatctgcagttgatgcacgaagagcgcatcagtggcctgatcttcgcgccgacccggaccacggtgggccggctcgaacggctcacgctggattatccaacggtgctggtggaccgcgccgcccccggcgggtcgatcgacagcgtggtactcgacaatccggcagcgatggcgggcctggtcgagcatctggtcgagcgcggctatcgccgtatcggcggattgttcggcagcaccagtaccacggcggccgagcgtcgcgacggctatctcgctgcgatgcgcacccatgggttgcagccggactaccgcgaggttgaacccacggccgaagccgccatcgcgacggtcgggcagtggctcgccacgccatcacgccccgaggcactggtgaccagcaacagcctgctgttgatgggggcattgaaagccgcccgcagcgctgggctggcgattcccgaggcgttggcgctggccggcttcgacaacgaacgctggaccgaactggtcgagccgggcatcaccgtgatcgagcaaccggttgaggagatggggcgggccgcgatgtcgatgctgcttgaacgcctgcgcacgccagcactgcctgtgcgccggctggtgatgacgggtcgttgcgtgggcagagggtcgacggctgcgcgatag

SEQ ID NO: 535646 - DNA, 630 bp, Stenotrophomonas maltophilia
atgattgccttgtcagagccttactcagcgctgctccgcctgcagttgtgccccgaagatctctccagatggctgtccgcgcccgtgcccacagcgtcccgatggtccgactggcgatgcatcgccgggcagtggcacctgggaaacggtgaatacctggcctcttcaagcgacgaggcgttggatcacctgcttgcggactgccaagcgctgctggcccgctaccccgacaatcgcgccgcattgaaagccttcctggcctctgcacaggctgagaacatccgggtcgccgcccatgaccgcagcagcacgcactttgttgcaggatcgctgacctattcagaaagcctctacgatctcattgcgtttcttgcggtggcacgaagcgccgccgacttcctgaaggcaggtgaccagggggtggcgctgatccacgactatctctgggccgagaacgatcagcgggagaccattgccgcgattgcgctggcaggccacggcgaatccagcttcctgtcttccactgacctggataccgccaccgcatccttcgagacattggtggaggccatgctggaagaccgggacgacccggagtttcatccgcgcaaccagctcgatcgactttga

SEQ ID NO: 535647 - DNA, 399 bp, Stenotrophomonas maltophilia; identical to SEQ ID NO: 504416

SEQ ID NO: 535648 - DNA, 396 bp, Stenotrophomonas maltophilia; identical to SEQ ID NO: 504415

SEQ ID NO: 535649 - DNA, 354 bp, Stenotrophomonas maltophilia
atgcaccgatcccacgccaaccccgcttcgccacgtgtactgcgtgtggagtgcatgcgcctggactgcggaggcgctgccatcgtggtggagctggaccgcatccctgaacgggcgtggatgaagtcattgaagcgggcactgcaggccgacgatctcttcgagggcgcacaagccaaattcgacggacgtttcgtttacgtcgtgggcgtcgagggcagcgagcatcgtgcgcagcatcgggtggtgcaggcgcttgaaatgccgcaggcaatggtcaatacgtcgcgctcacgcattccggtggcggacgcgcggcatgccggcagggttgacgctcaggttggccattga

SEQ ID NO: 535650 - DNA, 309 bp, Stenotrophomonas maltophilia
atgctcccaagaatcgtcggcttcgatgtcccgttgctgcatgagcgtgtagacgcatccaccgacgaggccatcaccgcgctgctcgatctggcgccaggcgcccgctggacagagatgttcctcatcaagtgcagagccctggcgtcccagctccagctggcggatgttcgcattgaaggcgccaggatctacttctacggatccatcagcgattcccgtggacttgccgacgcggtgatgtccattgtccacgtactgaatgatgagctgatgcgcgagcggaatcacgcagccagccgcgcctag

SEQ ID NO: 535651 - DNA, 216 bp, Stenotrophomonas maltophilia
atgaacagcgtccccgaacagaacaggaatgaccgctccaatgcttcctctgaagcagaacggcccacgcagcaggggcgggtcgaggggggcgaacccggaggggaggagcctggcaagcagggacagcaacagcagcaggacaacaaggatcgcgagagcccaaagccagcggacgaaaagaagggcggtctcggcggcgatacacgccgctga

SEQ ID NO: 535652 - DNA, 270 bp, Stenotrophomonas maltophilia
atgtcctcgcaaagccaggcgatcagcctgatgaccaagatcatgtaccaatgtcgtccggagagaaccacgacgatggcgcaatgccgttgctgccatgcgcccagcccaggcggcatggagtgcgcacggtgcctgaccggaaggctcggcgacatgattcagaaccgtggcgcagcattcagctggctggactcattccgcagggtccagcaggacgaagcacacgtgttcgaatgcgcaaagcgcgtcgatgcggcatctccctag

SEQ ID NO: 535653 - DNA, 300 bp, Stenotrophomonas maltophilia
gtggctaggttgaatccaacccagtccctgggagtgcgctggctgttctttcgccttcgcaacgggcagtccatcagtcccgcgaggctgatgtctgtctggtccgaggcggctgaatccaacgactgcgccgtgcgccgtgagatcatcgacggcgccggctacgtctatgccttgtatgcgcccaacagcctgctttcaccccggcgcgtggagctgcgcatgagggcgctgctggaggaggccggctacgccttcacgatgggcagcctggcggggcggcacccgggcggcggctga

SEQ ID NO: 535654 - DNA, 954 bp, Stenotrophomonas maltophilia
atgaacaccttcgcccgtaccctggccgctgccgccctcgccctctcggtccaggccggcctgtctgcgcatgccgccgaaccggccacgccggcggcggccaccagcatcgcgcgcaccgccagctacatcaccaccgccgacggcgtgcagctgtactacaaggactggggcccgaagaacgggcctgtcgtgaccttcagccacggctggccgttgaactcggacagctgggaatcgcagatgatcttcctggccgatcatggctaccgcgtgatcgcgcatgaccgtcgtggccacggccgttccagccagccgtgggacggcaacgacatggatcactacgccgatgacctggccgcggtgatcaatacgctggacctgcacgatgtcaccttggtgggtttctctaccggtggcggcgaggtggcgcgctacatcggccggcatggcaccgggcgggtgaagaaggtcgtgctgatcagctcggtgccgccgttcatgctgaagaccgccgacaaccccaacggcctgccgatcgaagtgttcgatggcatccgcaaggcacagatggataaccgcgcgcagctctacaaggacatcccgtcgggcccgttctacggcttcaaccgcccgggcgcgaaggtgtcgcaggggctgatcgatgcatggtgggcgcagggcatgcagggcggccacaagaacacctacgattcgatcgccgcgttctcggccaccgatttccgcgcggacctgaagaagttcgatgtgcccacgctggtgatccacggtgacgacgaccagatcgtgccgatcgatatctcaggccgccaatcggcaaagctcatcaagggcgccaggttgatcgtctacccgggtgcgccgcatggcctgaccgacacccacaaggacaaggtcaaccaggatctgctgacgttcctgcaggaaaagtga

SEQ ID NO: 535655 - DNA, 570 bp, Stenotrophomonas maltophilia
atgagcaagaccaccaccgatacgcatcagaagatcctggccacggccgaggcgctgatctaccagaacgggatccacgccacgggcatggacctgctggtgaagacctcgggcgtggcgcggaagagcatttaccgccacttcgagaacaaggacgacgtggccgctgcggcgctgagggcgcgcgacgtgcgttggctggcctggttccggcacgagtgcgagaaggcggacaccccggaagcacgcatcctcggcatgttctccgtgctcaagaactggttccagtccgagggctatcgcgggtgtgcgttcatcaataccgcaggcgaggtcggcgacccagccgatccgatccggcagatcgcgcgtgatcacaagcagaagctgcttgattacacattggaacttaccggacaactggatgtggagcagccggcggagctggcccgtcagctgctgatcctgatggaaggcgccatcaccctgtcgcgcgtgatgggtgattacgacgccgcagacaccgcgaaggatgccgcgaagctgttgctggaacaggccaggcgttag

SEQ ID NO: 535656 - DNA, 477 bp, Stenotrophomonas maltophilia
gtgtccactgaacacccccgtccgccgtttcctccgttcaccctcgaatcggccatgcagaaggtgcgccttgccgaggatggctggaactcccgcgacgccgacaaggtctcgcttgcctattcgctcgacacccagtggcgtaaccgcgccgaattcaccaacggccgggaagaagcccgccagttcctggcacgcaaatggaacaaggagctcgagtaccgcctgatcaaggagctctgggcctttaccgaaaaccgaattgctgtccggtacgcctacgaatggcacgacgactccggcaactggttccgctcctatggcaacgagaactgggaattcggagaggacggcctgatgcagcgccgcttctcgagcatcaacgacatgccgatcaaggaaagcgaccgcaagttccattggcctctggggcgtcgcccggatgaccatccggggttgtctgatctgggtatgtga

SEQ ID NO: 535657 - DNA, 732 bp, Stenotrophomonas maltophilia
atggacatgcagacagggggcggattcgttccgcccgcaaagaccgattcgcaggaactgacattccactggctctaccagcgggtgcagggactggttgagcacagcatctaccccaaggcgggcagggtggagacgtgggcgtttcgcatcggcgtgggtgcggcgatcatcggcattctcattggtcagcttccagatcgatggctgcctcttggcgtagtgctccaggtggttgttgcctgcctggcaatcgagatcggagggttcattgtcggtggcgtcctggccgcccgcaggggcattcgccagttcagccagccgcggctctcgcacgcccgggagatggatgaagacttcacccactggcaagcggtggtgaccgagcttcgcgacttccctcgcatcgagcgcgagcggcgactcaagttcgtcagcaccttgcgcacaaacatgatggagcgcatgggcatgatgtatcgcggcctgcagcggctgggaccattcccgctgttgattgccctctacctgcagttccgcggctggaaatggggcgactgggcgggcgctttcgatgttggcccgctgggtgcactactgatcttcgccatggtgctgctgtacctgctgggctggatgctgatcggccttcgcaccaggctcgatacctacgttgccttgttggagggctccatccacgaacccgagtcctcccagccaacgcctttatag

SEQ ID NO: 535658 - DNA, 669 bp, Stenotrophomonas maltophilia
gtgccaagttgtgatgaaggaatgaagttgacgcgtcgccaggtgatcgccggcggcgtcacgaccgtggcgatgtccgccgcaccgggggcatcatcgctcgccgccgaactggcggcgcccccgccgcccaggccgccggtcatcagcacggtggccttgaccgtcaacggcaagcggcgggaacttgaactggacacccggaccacgctgctcgatgccctgcgcgaacatctgaagctgaccggaacgaaaaaaggctgcgaccacggtcaatgcggtgcctgtaccgtgctcgtcaacggtgagcgcatcaacgcgtgcctcagcctggcggtgcagcaccagggcgatgccatcactaccatcgaaggtctcggcacccccgatgacctgcatccgatgcaggctgctttcatcaagcatgatggctaccagtgcgggtattgcacgccggggcagatctgttcggcggtggcggtcctggacgagatcaagcggggtgtccccagccatgtgcaggcggatgtcagcgcacggccccgtgccaccaacatggaaatgcgcgaacgcatgagcggcaacctctgccgctgcggggcctattccaacattgccgaggcgatggcagaggtcgctggcgcaacctctgcagggaggcgctcatga

SEQ ID NO: 535659 - DNA, 951 bp, Stenotrophomonas maltophilia
atgagggccttcagttacgaacgcgcgaaatccccggccgaggccgccagggccgtcgccggtaccgagggcgcgaagttcctggccggagggaccaacctgctcgacctgatgaagctggaggtcgagacgccagcgcacctggtcgatgtgcaggacatcggcctggacaggatcgaacccaccgacgagggtggcctgcgcatcggcacgctggtcaccaacaccgcgctggcctcgcatgagcgcgtgcgccgcgactacgcggtgctgacccgcgcgatcgtggcaggcgcttccgggcagttgcgcaacaaagccaccaccggcggcaacctgctgcagcgcacgcgctgtccgtatttctacgaccccaatctgccctgcaacaagcgcctgcccggatccggctgcggcgcactcgaggggttctcccggcagatgggcgtgatcggcacctcggacagctgcatcgcgacctatccgggcgacatggcggtggccctgcgggtgctggacgcctcgatccagaccgtcaggggcgacggcagtacgcgcagcatcccgattgccgatttccatcgttcccccggcgacaggccgcagcaggacaacgtgctgcagcgcggtgagctgatcacccacgtcacgctgccagaacccctgggcggtcggcacgtgtaccacaaggtacgagaccgcgcgtcctatgcgttcgcactggtgtcggtcgccgcggtcgtgcagcgtgacggctcggcgcggttcgccttcggtggggtcgcgccgaagccgtggcgcgtcgaggcagccgaacccctgctgcgcgacggcgtgaaggccgcgacccggcaggtgttcgccggtgcccgtccgacgcgggagaatgcgttcaagatcgcgctcgccgagcgcaccctcgcggcggtgctggtggaaggagagcgctga

SEQ ID NO: 535660 - DNA, 2205 bp, Stenotrophomonas maltophilia
atgccccttgaattcaacgcccccgccggcgacaacctgttcgacaaggccaaggtcgtcggcaagtcgacgccgcgcatcgacggtccacgcaagaccaccggtaccgccccctatgcctacgagcgccacgacgtggcgccgaaccaggcctacggctacatcgtcggtgcgggcatcggcaaggggcgcatcatttcgatggatgcctcccgcgcacgtgccgcgcccggcgtactggcggtcatcaccgcaccggaaaccaagccggtcggcacatcgaactggaacaatgcgccgctgttcggcggacccgaagtggcccactaccaccaggccatcgcctgcgtggtggcagagaccttcgagcaggcccgcgccgccgcggcgctgatccgcacccgctacgagcgcggcaagggccgcttcgatttccccgccctggcaccaaccgcgccgctggcaaagggacgcgacggcaagcccgaccggcagacgctgggcgaattcgacaccgcctacgcgagcgccgcggtcaagctggacgagacgtaccacacctccgacgaaagtcattcgatgatggagccgcacgccaccatcgccgcctgggagggcgacacgctcacgctgtggacggcgaaccagatgatcgactgggccaggcagggcatggcggcgatcctcggcatcgatcctgccaaggtgcgcgtggactcgccctatatcggcggcggctttggcggcaagctgttcatccgtgccgacgcggtgctggccgcgctggcggccaagcaggtcgggcggccggtgaagatcgcgctgcaacgcccattgatgcccaacaacaccacgcaccggcacgccaccctccagcgcgtgcggatcggctgcggaaaggatggccggatctccgccatcgcccatgagaactggtcgggcaacatcaacggcgaggacggcgagaacggtaccctgcagacgcccaagctctatgcaggcgccaaccgcctggtggccaactacatcgccacgctcgacatgcccgaaggcaatgcgatgcgcgcaccgggcgaagcaccgggccacatggcgctggaagtggcgatggacgaaatggccgagaagctgggtctcgacccgatcgcgttccgcatcctcaacgagcccgaggtcgtacccggcgatccgtccaagaagttctccgaccgcaacctggtgcgctgcctgcgcgaaggcgcggagcgcttcaactggaacaagcgcaaccccaggccggcgcaggtcagggaaggggactggctggtcggcatgggcgtgtctgcgggctatcgcggcgcaccgacgatgaagtcggcggcgcgagtccggcttgacggccagggcggggtgattgtcgagaccgacatgaccgacatcggcaccggctcctacacgatcatcgcgcagacggcagccgagaccatgggcgtgtcgctggaccgggtccaggtgaccctgggcgactcccgtcatcccgcctccgccggttccggcggccagtggggcgcggcaagctccaccgcaggcgtgtacgcggcgtgcgtcagcctgcgccgcaaggtgggcgagaaactgggcttcgacggcgacaccgcagacttcgccaatggccgcatccaggcgggcgggcggacgatcaagctggcggaggcgggcacactgtcggcggaggacggcattgccttcggcgacttcaaacaaggctacgacgtcggcacctatgcagggcatttctgcgaggttgccgtgcatgcctacacgggagagacgcgcatccgccgcatgcttgccgtatgcgatggcggccggatcctcaatccgctctccgcacgcagccaggtcatcggcgggatggtgatgggtgcgggcgcgaccctgatggaggagctggtggtcgacaaacggctgggcttgttcatcaaccatgacctggccggctacgaggttcccgtgcacgccgacattccgtaccaggaagtggtcttcctcgacacgctggatccggtgatctcgccgatgaaggccaagggtgtgggtgaactgggcatctgcggggtcggcgccgcgatcgccaatgcggtctacaacgcaaccggcgtgcgcgtgcgcaactatcccatcaccttggacaagctgttgcccggcttgcccgacgtaggctga

SEQ ID NO: 535661 - DNA, 1062 bp, Stenotrophomonas maltophilia
atggaccgacccgcagcctcgcccactctggaggcctccgctgcaggcggaggggagcacggcgatcttgccgaggacctgtccgcagcgccgggcttcctcgccgaaggcagcccgcgcggcgtactcgagacggccttgacgcgcatgcgcgcgagggagcaggccgtgctcgcgctggtgttggaaaccgatggctccacttacgccggtgccggtgacatggtgctgttctgcaacggcagccaggtcggctggctgagcggcggatgcctggagccggagctcgcgcgacgcgcggagcaggtgagcgcggcagggcgggtcgactggatcgagatcgacacccgcagtgacgaccacctgttgagcgggtccgcgctcgggtgccgcggccggctgcggattgcgctcctgccattgcgtgccatggccggcatcgacgacgtcatcgaggcctggctgcgcgagggcgtgtcactccagcgcgatcttcgcacgtcggggcaggtcgttttccgcgccggccatcgcgagcaggcatggcagctgcatccgatggacggggcgcagtcctttggcgagggcgcatggcatttgccgttgccccgtcttccgcgggctctggtgttggggggcggtcccgaaacgcccttgctggttccgctgctgcggggactggggtggcgggtcagcgtggccgaacggcgagcgcgctgggcctcagccgggcagggcgcggatgtgcatcttcagaccagcccggccgaggccctccatgccgacccgtgcgacgcggcactggtgatgcatcacgatttcgaactggatcgggaggcgctggtggccctggctgataccaacgtcgcgttcattggattgctgggtccgcggcgaaggcgcgaggacctgttcaagctgctgacaccggatcagcgccaccgcctttccccgagacttcgatcaccggtcggcctggacatcggcggccgagggcccgaggcaatttcgctcagcatcgccgcgcagctgcagcaatggcgaagcgcgcacggcaggtga

SEQ ID NO: 535662 - DNA, 627 bp, Stenotrophomonas maltophilia
atggcgaagcgcgcacggcaggtgactgacgcgcatgcggtcgtcgtgctggctgccggcgggagcacccgacttggccagcccaagcagcttctgacccggcagggcgaaaccctggtacatcgcgtggtgcggttggcgcgcgagctcgcgccagcgcaggtcctggtcgtggtgggcgcgaacgcacaggtcgtgacatccagcattgccgggctggaggccactccggtaaccaaccaccactgggaacgcggcctggcgagcagtctgcaggttgccggcgcgcacctgctgcccacggtgaccgcggtgatggtcgtggcatgcgaccagcccgcaattgagcgctcccatctgcaggcgctgctttcgggtgcccgcgcctcggcgtcagggtgcgcgggcgcccgtcatggagacgcgcttggcattcctgcagtagtgccgcgtgcctggttcgcccacgtcggtgcagccggtgaccgcggcttcggaacgcgcttgaggcagcttcccagcaatgccgtgcatgcccttcaagcgccggagctgggcctggatatcgataccccagaagatcttgcgcgcgcgcgcgatgcaggctggatcgatgccgggaggtga

SEQ ID NO: 535663 - DNA, 471 bp, Stenotrophomonas maltophilia
gtggcgtggtggcgctgggcggccaacgcgctctgtcttgtggtggtggttgcggcacaggcgcagtggccggcaccgccggtgccctcgcctgtcgcgttccaaagcatcaacgacgatcgattctcacaactgcgccgccaggcgatgcagttcgtggactctcggccacgacagggcttccagttcgtcgagcggcgccgagatgccgagttccaggttcattgccggggcatacccgtgctgtggatggagaggcgctcgcaccatctgctgttgcaggtctcactggacgcggagcagcgggcgcccgccgttgtgcagcttggcacgttgcttcaatggcagctggagccggtgggctatctggagcaggtgctggctgacgtgccggaacctgttctgttggatcgggtgctgcagatgttcgggggcgaggtgcctgagggcgcgcgatgtggcccacactag

SEQ ID NO: 535664 - DNA, 357 bp, Stenotrophomonas maltophilia
atgacccagccccactcccctgccccgcacccgatccacgatgcgtctgccaacggcgctgcgcttgatccgaacaccctcatcgccctgctgcacagcatcggctccggcgccgcctccgatggtcagccgtggccggaacgccatcagatgcccggccgacgcatcgccctggcggacaccgactgctcgctggcgggtctacgggtggtgctggagatcctgctggccgcacagcgtgcccgcgagaacggcgagctggagcaatacgtcggcccgcgcgtgatggaggggctgatcatggccggaatcggccttaccgcacacgccagtacccgactgcatccggagggctga

SEQ ID NO: 535665 - DNA, 756 bp, Stenotrophomonas maltophilia
atgccctatatcggaatcggactccacgtactggcggccatctacttcgcggtgcacgccatccgctcgggccagagcctctactggctcatcctgctcttctcgttcccgttgctcggtagcgtcgtctacttcctggcgatctacttcccggaagtccgtcactcgcgtggcgcccggcaggtggtccgttccgccaagcagctcatggacccgggccaggacctgcgcaatgcccgcgccgaactggcgcacacgcccaccgtgcagaaccgggctcgcctgggcatgaagctgctggatgccggccaggccgaggaagccaggaccctgcttgagcaggcagccagctcgccgctgggcgacgatccctacattctgaccggcctggcgcgtgcccgcctcgattccgggcagcccgcgcttgcggcggagacgctggacggcttattcgcccgccatccggatgtgcgccgcaaaccggaacagaccctgctttacgcacaggcactggcagctacccaggcgcccggcacccgtgccgcattcgagcgcgccgtggtatgcggaaacgatgcggccgctcgctgcctctacgccgaatggctgatggcacagccgcagcccgacgatcgcgagcaggcccgcagcctgttcgccagcatcatcgacgatgcccaacactggtcgcgccacgcgcgcagccacaatgccgtctggttggagcggaccaaggccgcgttgaagggctactga

SEQ ID NO: 535666 - DNA, 402 bp, Stenotrophomonas maltophilia; identical to SEQ ID NO: 529930

SEQ ID NO: 535667 - DNA, 438 bp, Stenotrophomonas maltophilia
atggccagtaaagaacgaaacgccgcccttgactatctcaaaacggccaggcctagaagtagtgcccacaaggtccttagtcaagacgatttccttggcgggctggtcgcgtacattcaatacagcgatagcggaaaagagataaagcagtgggttgtcgttaccgggaagcacaagggttacgctgactccgaaagccagttgatccagcaactgcagactgcgagcaataaagaaggagttgagccgtcttgggctacgagggtgtttaacatctctggcctgattgctctgattctggtcggagcctccgtgtacttgacggttaccacgccgggaggggatgtcccggagcacctgaaggcgtcagtgcttactgtcgttggcttctactttggcggcctgtccaagagcgcacgggcgaagacaggcggctaa

SEQ ID NO: 535668 - DNA, 588 bp, Stenotrophomonas maltophilia; identical to SEQ ID NO: 535644

SEQ ID NO: 535669 - DNA, 357 bp, Stenotrophomonas maltophilia
atgcggccaggacagacctcgctgcgcagactggcgatcgtcccagcgctgtttaccgtgtggggcatctggtcgatcagccaccgctacggcggttcgctggtggcttggagcgggtggcttgccggcatccgtgcgggtgcgatgcggggctggctgctgctggtaacgttcctggtgaagtgcggatccgaggtggcgcttgcggtgtcacctgcgctgagtgccaacggcaacttcagtgccgcgtatctgctgctgtccggcgggttcaccggcgtctttgttggtaagtacttgcggtatctgcatgcactgcgcaagggcatgcccagtaatttgggcccggcgcactga

SEQ ID NO: 535670 - DNA, 183 bp, Stenotrophomonas maltophilia; identical to SEQ ID NO: 529927

SEQ ID NO: 535671 - DNA, 1242 bp, Stenotrophomonas maltophilia
atgaacgcgctttactactacggcgaggcggtgttcgacggtgataagaaggggggcgtgatgctgacgcttcaccggatcgcgcatcagcagctcccacggttcagcagattgtccagcacaaaaatggggcgctaccttgcgctgtatcgcttccatagtctcgcccctttttttgagacgcagatcggaattgatgtagacacctacttcgtaatggccttcgctgtgattagtgcttcagctcagcggccttgcagtaaccgactgacagattattcagtattgggcatcgatccgggctctgcagagcggttcttttcaagagtcgtgggaacgactgacgaaattcggaagaagctcatagatgaccagcgccttggcgactgttgggaatacacgttcaacgcgcttcacttcaagccgctggtcgcttttgatgctgaccatcccgaaagactgatctgccccctgccatacgcagtggagagcaggctcaccgagggcatcttcttcgacgtagctaccaagggcgcgggctttgagaaagcatatggcgatggggtcgagtacatcattggccgcatgctgcagtctctcccatccacttactcggtctccaagcctgtcaaacagcgagtcgggaagctcgagttcgctggcgccgatttcataatcgaccagaatcaaagcagggcgtacatcgagtgcaaggcgaagcgcctggcgttgcgcggccgggttgcagagaagctggaggatttgcgcagtgaaatgcagcacctagccaacgccatccttcagaactatcgaaacattgaccgggaaactagcgaacctgacgcaacgaatgatgcacaatgccgcatattctccattgtgataacgcttgaggactggctgcttttcagcaacgtcgctaccgatatgctggagcgtctcgtcacagaaggacttgaaaagtctgggctgccggccgacctgaagcagcgagtcccctatctggtcttcggagcagagaccttccagcatgctgtcgcagcgatgaccatacatccgatgtcggatgtccttggcggtctgggcgcccctcagtacgaaggatgggtaccctcgacgtatctgcagacgtgcttcccggacgtcaaaacctcgtcgatcggaggctttgacaaggacttcaactctctcgttcactcgcttctgtcagatgccaagatgcgtcgtaacaggactctgtga

SEQ ID NO: 535672 - DNA, 2241 bp, Stenotrophomonas maltophilia
gtgatcacggggctatccatttaccgatataagagcttccatccaacagtagctcaccccatccactttgaggcgaacacgccgccccggcccgtctttctctacggcatcaatggcgccggcaaatcagccatcggagaggtgatccaaggactggctgggaaggaagcagagttttcccactgcgccttgcaaactagcaataacgctgactatcgaattctcgtctacaaccaacgcttcgtagataaggtaatccgtacggccgagggcgtacctggaatcttcaccattggcgtccaagatgccgccacccagacagagatcgaagagaagcaagccgaaaccgagaggcttgaagcgcaatccgcggcgttggacgcgaagatccagcaaacgattgacgcaggcaaggcagttagggacattgccattactggtgcttggaaggcgcattctgactacgatcaagggccattccgggacttgatgaagggctttcactctgatcgtcagaagttcttcgaggagctggacacttacaccgtcgctgacgacgtagagctggacaaccttgatcgcttaatgcaaagactggcagacgccaacagcacggagagttcccagcccaagatttctttggatctagctggactcgctatcgttgaggctgacgccatctggggcgatgtgattgccgtctctgcgaccagtcgtctggcgccgctcatcgaaaagtggggtaatagcgattgggtgggccaggggcgaaagtttgcgcatgatccagagtgtccgttctgtcagcaacatctgccggctggcttcgccgaagatctagctttgctactggatggagacaggcagtcgaagctcgatcgggtccagtcgctttccgacacctacgctcagcgtgttgccgagatcgaggtggcagctaagaccatgctcgaacaggcgttctccaaggaagagccggggttggagcaggcttgggatctatttcatgcacagatcaaggctaacgccgcctcgatgttgtcgaagatcgaaaagccgggcgagattgttgtgctagaagccagtaatgctgagggtttgacgaaggcgatcgctaccgtgaacgagcgggtcacccagttcaacacccgagttgcggatcgagtcgctgagcgtgagcgcatcaagaccatgttctggcaggtcatgcgaagggaacgggcgcccgtctatgacacatacaaagcgggcaaagacccactagcggaagtactaaagaaggacagggaagacaaggcggaggtaagtagggcgctgacggctgtcgccgcgcggttaagggaactgcgtcgtgtgcaaagcggtgttgctgcgtcggtggataagatcaattcgcgccttgcacggatggggattgcgtcctactccattgccaggaaagccggcgaagggaatttgtattgtttggcgcgtcccggacaagccgaaggagatatgaagtccctgagcgaaggcgagaagactctcatttcctttctctactacctggaatgccttggcggctcagacaccgccgaagccggcgctgtcgatctcgggaggaccattgcggtcattgatgatcctatatccagcttgtctcacaattttgtgtttgacattgcctcgatcatctacggagagctgatcaagccggaagatggaatacccaggccgcgccaggtgatcgtcctgacacacaatctgttcttcctgcacgaagtgcttaggcagacgatcggcggatccgatcttgccaaggcgtcaaagaagtgccagctcctacgtgttgtgaagcccgagcacaccaaagtcgtgcccatgaaggctgccgagctcatgaacgactaccaggccctgtggcaagtgctacgagacgctcgcgactccaacgtgcctgcgatcatggtgcccaacgccatgcgttgcatcctcgaacactttttctggttcactcatcaagaggacaagttcaaagaggccttaaagaaggtcggcgacgaagacgcaaccttcgctccgttggcgcgctacctggatcgaggatcacacaaggatggaattaacatcacggtgatggacttcaatcaatacgatctgaactactacttcaccaagttccaggctgtgttcgtagccgcagggtttggcgatcactacttggcaaacatgggcgcggcagaggattcatccgcagcgtag

SEQ ID NO: 535673 - DNA, 1035 bp, Stenotrophomonas maltophilia; identical to SEQ ID NO: 514165

SEQ ID NO: 535674 - DNA, 183 bp, Stenotrophomonas maltophilia; identical to SEQ ID NO: 535643

SEQ ID NO: 535675 - DNA, 750 bp, Stenotrophomonas maltophilia
atgagtcatgaagagtcactaccccaacagtccgtgctatctgtgcgggggcagcctacagaccctccgggcgacggatgccaccctgaattgctgcaccagctgcggcacgttgattaccaagcgcagggatacgccgagctactccagcgcgttccctggcaacagttctggacgctcacgttcaagctcagcaaaaccagtcgcacaggcggcatgcacgaggaagcggctgataaagcgttccgctacttcgtcagttgcctcaatcgcagcatctacggtcccaagtgggcatcgcgctggcatggcggcattcagtgggcgcgaggccaagagttccaccgtgatggccgtctccacttccacgccgttgcagctgcacctaccgatgaccttaaccgcctcgccagccgctacgagtggcacgaatggtggtaccgggagttcggtcgcaatcgcatcgaagcgccgcgcagccaggcagacattaccggctacgtaagtaagtacgtcacgaaaggcggtgtggtcgatttctcgcggaacttcggggcatggaacccgccgcccattgactacacgcgccgccccgagcaagacgccttgatcgcaggcaacagcaacacgcgatccgacagtccagggcgtcacctggtcaccgggcggactgatgcaagcatcgcgcaacggggcaacaagcggtccaccacgtctccctgcgggggggtagggggggacttagcttga

SEQ ID NO: 535676 - DNA, 297 bp, Stenotrophomonas maltophilia
atgaatgctcccaagatcaccatcaacagcaatgtcgaaacccgcaccgtgaccaccaagaccggtatgcagaagccggtgtacagccagcgtgcaacgctcgagaccgaagccatgcgcatccagatcgaagtcgaggtggatggtctggatcgcggctatccggtcggtgcagtgaaggaatgggatgtaaccaccgacctggtgcctggccgcttcggggttgaactggcccgccgcatgacgttggttgatccggctggtgtcaagccgcagcccgctaccaaggctgcctaa

SEQ ID NO: 535677 - DNA, 222 bp, Stenotrophomonas maltophilia; identical to SEQ ID NO: 535642

SEQ ID NO: 535678 - DNA, 240 bp, Stenotrophomonas maltophilia
atggaactgaagaacaccctgcgccgcgttggcgcttccgtcccggccaaggtcagtgccggcgtcgccaccctgatggcatccggtgccgccttggcatcgggcggttccggttcgccgggcgctgcaatcgcgggtgagctgtcgggcggtaaggcggatgtgatgctggtggtcgctgctgcggcggtgatcctgggcgcgatcatcctgtggggctacgtcaagaaggctcgctga

SEQ ID NO: 535679 - DNA, 1338 bp, Stenotrophomonas maltophilia; identical to SEQ ID NO: 535641

SEQ ID NO: 535680 - DNA, 318 bp, Stenotrophomonas maltophilia; identical to SEQ ID NO: 535640

SEQ ID NO: 535681 - DNA, 1194 bp, Stenotrophomonas maltophilia
atgatctactggtataccggccagcctggacacggcaagacccttcacggcatcgaccgcctgctggaattcaaggatcagggcagggcagtctatgcttgcaacatccgcgaattcgactacgccaaggcgggcgttttggagatgacgccagagcagttccgtgactggcccaactttttgccagatggtgctgtcgcactggtcgatgaagcgtatgagcacaacatgcttccgaaacggccaccgggatcgaaggtgcccactcatgttgagcagctggcaaagcatcgccatcgcggccttgatttcatcttcatcagccagtctcctgacaagcagtgcgatcagttcgtgcatgatctgatcgaacggcatgtgcacgtgcgtcgccgcttcggaaccaagtttgtccatctgcgtgaattcgaccgctttgagtcacaagcggagaaggcaactccgctggtcgttaagcgcaaggcgttgcccaagcgtccgatgggcttgtacaagtccactgagttggacaccactgagcgcaagattccttggtactacgtcgcgctgccggttgctgtggtgggtggccttgggctgatgtactacacctttggcaacatgggcgagcgattgggaggtggtacggcaacgccaccttcgccgagtgcgcagagcgcacatgcgacgctcgacggagcgtcagcgacggcgggcggcgcaggtgcagcgagaggcacgaagacgattcgggagtacgtcgatcagttcatgccgcgcatcccatcggagccatggagtgcaccggcctatgacaacgccatcagtctgccgacagccgcaccacgtcttttctgcatgtcttcgctcgctggcgagaacgcaaatggcgatcagggcgaagccagttgcacgtgcttcaccgagcaaggcactcgctatcagctggcggatgagccgacatgtcgctatatcgctcgacacggccagtacgaacctttccgggaccagcgcaatgaccgcttcgttgacggtccgacacaaatggaacgtgcacgcagcgatcttgcggatagagagcagggtggagcggtgatgcagcacgttgagcgatctgtaggcagctttccggagtccaagccccatgcaacaagcacctacctgaccaccccggcaggagctaacaagctatga

SEQ ID NO: 535682 - DNA, 636 bp, Stenotrophomonas maltophilia; identical to SEQ ID NO: 535639

SEQ ID NO: 535683 - DNA, 381 bp, Stenotrophomonas maltophilia
atgattgagttcgacccgcaccaccgtatcgacttgaccggcacttgggccggtttttctttcctcggtgatcgcctgatcacccccgaaggtcgcgaactgctcccggaagatttggcctggctgtcgctcaccgcctgccaagcacaggaatggcgccggatgatggaagctgctcgctcggcaccgtcgatcgacagttccagaaatgtgcgcaatcgcgacgccggcattcgtcatcatcctgccactgtcgtcaatctgcgggatgtagtgagccagcgcaaacagcgttcggcggtggcgatggctgggcccgacgccgagccacccgcagcaatcctgccggtaccggggccgaaacgtcgccagcgcgtgtga

SEQ ID NO: 535684 - DNA, 441 bp, Stenotrophomonas maltophilia
atggcgcggcaagccgggtcgcgcggcctcacctgcgcactgggcgactacgaactggcattgtttgttgaaaagctgggggacggaaccagcttcggccattgcggcggtagcgatggcttccggactcagctgtatggcgacacgcatacagggcagggtgcggtagtgatgaccaacagcgacaatgacgccgcactgatcgacgagcttttgatcagcattgccgctgaatgtggctggccggagttcaacgtcatcgagaagaccgccgtcacgccgaatcccaggttcaacgcggcggatgcaggtgagtatcagctgcgtgaccagcctgcacatgtcatcaccgaggttgaccggccctgtttccagagcgatcggtttggcgcggagcgaatggagctgttcgcacagtcggatgcagccgggcctgtatga

SEQ ID NO: 535685 - DNA, 459 bp, Stenotrophomonas maltophilia; identical to SEQ ID NO: 504575

SEQ ID NO: 535686 - DNA, 1509 bp, Stenotrophomonas maltophilia
atgatcaacctgattccgaacaactgcatccgcctgctgacatggctggcgctcagttcaattgcattcggttcacatgcgcgtgcgggagttgagaacccctccgcttatacgtactcgcgcattttcggcgtgtctgaggccgaggccaggtatcgatcgttgaagtcggtcgctgcagcgcccttggaggcgaggatccaagcagcggaacccgcaacctttggcggcctgtatgtagaacaccaaccagacttcagaatcgtcgtcatgttcaccaggaagcctgccgagacgttggcgaagtacacccaggatcctgtctttgtcgctggcacgtccccccaatcccttgagatgctgctggctacccaggccgagggcggcgcccagctccaggcaagaggtgtcgagttcgagtcggggcttgatgtcagacggtctttggtgaccttctatgtgaaggacgaggtcgccgccaagcgtacgctacggccgctgctcggtgcagtcgattttgtgaagatcaaggtggtcaaagggttcactgtcaccacagcgatccagggcggcaacagaattgccggggctaccattgcgtgcaccaccggtttcaacgtcttcgacgcagagcgtgagcttggcattctcaccgcaggccattgtgacaatgccgccagctatcagggtgtcgcagcgcctatggtattccaggcggagcaggacgctggcgactacgatgtccagtggcacaaggaatcagccaccgggccacgccagccacaggcaaatgaaatcaccctgatcaacggaccgtcgccgaccctcgagatcaccagcgtactcccctcgacggcaatgcatctgggcgatgttgtctgcaagagcggaatcagcggtcattacgcgtgcggcaccatccaggacatgaactcaatgtccaactacaatggagtaatcgggcgctacattcgtgcgcgcaacctttccgcaggcccgctgagcgtcgaaggcgacagcggaggaccagtcttctccaatcacgcagccgttggcatcattcatggccgcgggggggaagggaccgggttcgagaacgacttgtactacatgcccatcgagcgggtttcggtactgggcgtttccgtgctgacagaggcgtttgaagttaccggcatcgctgatcgtacagaaaactatttcaggccattctccgttccggtgacatacaagggagtgccgaagttcccgatcgagctgacgctcgagcgtcccgtatgccccagcggcccctgcgaacctgcgacggagacgctgtccgagaagacgccctctcctctcaactacacctgggtctgcttctatccaatcgtgctgtacccgccaccggtcatcccacctccgcccctgacctggagggaacgggtgaccttgaaggatgcctctggaattgcggccgagccggtggagtacaacctgcactgcagcggatgccctgattgcccatag

SEQ ID NO: 535687 - DNA, 1044 bp, Stenotrophomonas maltophilia
atgacacgcatcgacttcgtcggtcgcgggctgctgttgtccgcgatcctgttactggccgcctgcagcacaggcagcatcaaacccacgccaccaccactggtgggcgctcccgtcgtcaacgtggtggatcctggcaatctggtcgtgcatacgctgccgatcggtgctggaaactgccagatcgctcaatgcccttcgggtaaccgcttggtggtgatggactgcggctccaagggcgccggcacccaggactgggacgcgggcaaggtaaagggctacgtcgaaacgctgatcgatgacaagagcgagatcacggtcagtatcagccatcccgacgaggaccactacaactacatcgccccggtgtttgccaacatgaaggtgacgtcgttgtatctgggcggtgactggagccagtacaacagcaccttccaagactgggtcaagacgcagaggatcaaaagtgcggcgcaggtcaacatgtacacggggttctacgcatccgccacgcccgaaccggggttgagctgctggaagcccgagcacgggggtagcagcatgcaggtggccagctacatcctgggcgtcaacgcgggcaccaccaagaacgatggaagcatggtggtggcgatgcgctatggagacttcaccacgaccttcaccggtgacatgacccaggcgaccgagaacaagctgcagctgccgaacggtctcaagagtttcaaggccaacctgctgaccggagcacatcacggcgcgtccagccagggcagcaattcggtggagtgggccaaggcgaccagccccgatttcgtgatcttcagcgccgggctccgctacagccacccgcgctgcgacgccgtggatcgttacaccaccgtgggcgctgcactgcctgagcacgagtacttctgcgggaacagcggtacgggcgagaaccggaagaccacggacaacatcctggtgaccgactccaacggactgatcgtcatcgaagccgatacccacggcgcgatgaaggtgctgccggtgaagttctga

SEQ ID NO: 535688 - DNA, 1410 bp, Stenotrophomonas maltophilia
gtggccgaattgaaccggaatgcgcccgcgttcttcgccgccgccagtgacgtcggcgaggcgcttgaacatcagggcgtttcgaggcaatccctgtgctttcgtgcaggcgacgacggcagtgtgctgctgagcgccccggcatcgacgatgcgcgtcgagatcgacggtgtgccgatcagcgaagacatgcgcgggacgcccattgcattcgacacgacgcggcttcgccgtggggtggtacttcgattgggtggcagtgtcctgctgtgcctgggctatatcggtatcggcagcgccgggcagggcggcagtgcactggtcggggtgagcccggcgatgacgcgggtacgtgcagcgatcgcccaggtcgcggcaaccgacatgccgaccctgatcctgggggagaccggcaccggcaaggagctcgtggcgcaggccatccatgccgccagtgcgcgttcgcaccggatgctggtgagcgtgaacatggccgccttgaacgagtcgctggcggcggcggatctgttcggtgcgaacaaaggggcctacaccggagcacaggtggcgcgcgaaggctatttcgccgaagccaacggcggaacgttgttcctcgatgagattggcgacacgcctgcggcggtgcagccgatgctgctgcgggcgctggaaaccggcgaataccgaccgcttggaagtgcacgcaacgagcgcgccgacgtgcgcctgatagcggccaccgatcgggatctctccacgccaggcttcaaccagccgttgctacgtcgccttgaagccttcgtgattgcaatgccgccactgcgcgagcgtcgccaggacatcggtgttctgatcgtgcagctgctgcaacgttggcagggcagcgacgctgcaccggtggagctgcctggctcggtggtgcaggcgttgtgcctgtatgactggcccggcaacgtccgccagctggcacatgtgctgcggcgactgagcctggcggcacaggtacaggaatggccggacatgcaggcattgctgccggctcccgtgcccgcgcccgtctccctgtctgcgcctgcgatggacgcaggccaggtggccgctgtggcgccggcagtgcgctatcgctcaccgtcgcgggtcggcgaggacgatgtgattgctgcactggaagcacaccagtggtgtgtgcgcaaggcggccgagcatctctgcgtctcgcgtgcttccttctacgtgctgctggacgcatcgccgagcatccgccgcgccgatgacattccgctggacgagataagccgcgcggtcgcgcaggcccctgacgatccgggccactgggcctcgcagctgcgcacgccgcgcgaatccctgcgccggcgcgtgcgccaactgggcctggccaagcgcctgtag

SEQ ID NO: 535689 - DNA, 609 bp, Stenotrophomonas maltophilia
atgtcgaccatcactctgatcaacgaaaccggcgaaaccgttcgactggccgtgttccagaagccggtgagcaacccgaccctggccacgatcgcctggcaggttgccgcaccgccgccgggtggcaactcggtcatccagatcccggatgacttcggcctgcaggtgcgttactcgaacgatgcttcccgtcccgaccagctggacacctcggccaagccggcctccttcgccgagacctccgccgcgttcaccatcgacagcgtcgcctctcaggatcgccgctccaatggtgcggtgatcaaccagagctttaccgacctggtgctcaatgaggtgcgcgtggtcaacaacttcagcatcggcgtggaagcttccatcctgcgcggccaggacgcgatctacgaaccgcaggtcatctggccgggcggcctgttcatggaagatgtacgcgcgagcatgttcgtcgccgtggtttcccagttcacctacaagggccagcgcctggtgcaggaagaaatcagccagacccagctcgaggtgctcgagggcgattcgctgatcgtcactgggtccaagtggaagggctactcgctgaccaaggcctga

SEQ ID NO: 535690 - DNA, 408 bp, Stenotrophomonas maltophilia
atgaccactgcgccttcgctgcccccgctccatgccgactcgccccccctgcccagcaacatctgggcgccctcgccagacgccagtatcgagatctactggagtgatcccgtggatggtgcgttcgatgtcgccctgctgttgatcgaccgggccatctcctcgatggacccggtcaacctcatcgcccgcagcattctggacagcaccaccccacgattgacgttctcgcttgtggacccctattccaacaaccggatcctgtggggacggatcgagcgtcgtgtcgatgctgacggctgcatcggagtctggctggtggacaccggctatcccggcggctttaccgatctcgcaaggattgctggtcccttcgaaggaggcgcgcatggcgatgccgggcactga

SEQ ID NO: 535691 - DNA, 2811 bp, Stenotrophomonas maltophilia
atggcgatgccgggcactgacaacgcgggcgttttcgagcaggggccggtgcgcatcaactggaccttcggcgccgatgcgctggcctgcgatgtggatgtgtcctggcaggggcagctgctcgcacgcaagcatctggtatccaacgatccgatactggcgttcgatgcgcgcggcgaaacctcgccgggcatgatgatcgtcggccagctgcatttcgatgccagtcgcgccgcacttctgctggaccagctccgctatcccggcggaagcgccccgccgcaactgctgggcgaagcagtgccgcccgccccggtgccggaaccggcgcagggcgaagtggtgcagtcgcggctcgaggaggcgggcgacttgttcccctatatccagctccgggcgtggccgggcacttcgacccgggcccaggaggacaacttcatcgcttactccggcacctgcacgaccgccgacccgcgcctgtactgccagctggccgcgttgcttccagcgggagacagtgcgcgcagccagatgcttgagcaggcggtgatgttcctgcagggcgatgcgccctacaccggccagtgcgtgcccacgattgccgtgctggggccggacgctgttgcgctggagcgcttcgcgctggccgctgcagcgattccgctgccaagccgcgaagcgttgatcgatctgatcgtgcagctctggggccaaccctggccggcgatcacggaggccatggcctcgacggaattcgcgcagacgcttgatcggatctggcagaacgtgttcgccttgaactgtgtgcttggctatgaccgtcgccagcgcgacgcactcacccgcaccctccaggcggcatcactgctgggccgcctgtcgcgcgataccgcaccgggtttcgaggggcgttggccaccagaacgtctgcgtaatggcctggccgccaccctgttgttgccttctcccgtcttcccgctgcccgccgccgggcccgcccgggccgaagagccgtcgagcatcccgatccagccctatgcgatcggtgagctgcagcaggtcaagcgccgcctgttgggctacgcgctgggagaagtcagccacatcgagagcgtgatggccgatgagcgcaaggtgcgcgcccggcatgagcgcgctgacacgctgagcgagcatagcgctcggacaggcgtggccgatacccatgaggatctgcgcgacggcctcgccagcacgctggagtcggaagtccacaacgcgctgcgcgaacagttcaagctcgagtattcaaccacctacggtccgcccacccagtgccagcaggacggaagctgcacgctgatgccggtggacacccagcccacccgtgatcgcctggccgacagcgcgacgctggcgcggcggatcgtccagcgtgccgcacaacgggtcaccacccagctgggcgagcagcggctgcagcggcatcgtcacacccgccgcaatgaagtctcacagtgcttcgatcgtcgcggccgcgccaacaaccagcgtggcgtctaccgctggctcaatgcccgctaccggtgctgggtggtctccgtcggccatcggctgatgctggaataccgtgtcccgcggccgggcgagcggctggtgcacgctcgccgtgaccagtatgggcaggcgctggaacagccgctggcacctgcacagctgggcctgcgccagttcaatgacctttcgctggatccgcagagcccctgctactacgctgcgctggcggcacgctacggcgtggaggtcaccgagcttccgcccacgcccgaggcacatgcctgtacggtgttcgagagcggcacacccttgttgagccagcagctgccgctgccgccgggctatcaggcggtctcggcgagcatcgccctggccagtgccagccagggttggagcatgcgaggcagcatcggcacggccgggttcaccaccgaggggaatgcatcagccgtcctgccggacattgccttggccgggcagaccggcgcgctgcccatcagcatcgtcctggtcgcacctgccggcgcggaggagccgtccgaccctgcaccgacggcaacgccgctgcccgtctatggattgaacatcgatgtacgcctggccagcacgccggagctgctcgcggcctggaaatcacgactctacgatcggctgatcgaggcctggcggcgcgagctgctccgctatttcgatgccgccggtgcatcgccccggcgccaccccgacgggcaggcgcaacagcgcagcatccgccttgaactgcaacgggcaggagtgcgcgggctgcttggcctgtcccgccggcgcacgggtgccgatgcgcctgaccagcaggtggcgcccaccctgcagctatggctggaccaggcgctggagtggccggagctgacctataccctgatcgatgatccggaggctgcacccgcgccggatcctgatgacgccgggttgaccccgttcctgcaggccgcgcaggcacgggtactgctgccggtcgcgccgggccatgagaacgcgctgctgtacttcctcgctacaggcatgatgtggctgggtgatgacgcgctggtgcctacgttccaggcaacactggaggcagcccccgctaaccaacctgcgacgctgcgttacctggacctggcggccgatctcaaggtgatctcggccacgccggccccagcacctcagcgggaggcgtgggagctgatggtggccaccgatatcagcgtcctgcaagacggtgaagccctgcccgacttcaaggacgaggcatga

SEQ ID NO: 535692 - DNA, 585 bp, Stenotrophomonas maltophilia
atgaacaccgcccagcccatcggcagcgtctgcctctatctcggcgaccttgcacaggtttcgcaggcccccaatccggcctggtcgagcggcgacagtgccgttgccgcgtccgccgcgagccgcacagatggcccactccacgccttgctggaaccgctcggttggatgccctgcgatggccgcgaaatgcgcatctcccgctacccggacttgtttgccgcgctcggctgcctgtacggcggccagtacgaacgcggcatcttcaacctgcccgacctgcgcggcatgttcgtccgcggggttgacgacggcgccggcgtggatccggaccgcgaccagcgtcgttccccggacggcaacccggactattccggtgtcggctcgctgcagtgggatgccctgcaggcgcatcagcatgactacagcgaacccaccggcagtacggtctccggcgatgcagcgcaggcctgcaatctgccagccaagccccagaagaccaccgatcctgtcaccggtcgcgtgagcgtgcatgagacacgcccacgcaacatggccgtccactacatcatccgtgttgagtag

SEQ ID NO: 535693 - DNA, 561 bp, Stenotrophomonas maltophilia; identical to SEQ ID NO: 504583

SEQ ID NO: 535694 - DNA, 2145 bp, Stenotrophomonas maltophilia
atggacaacgttgtggagcaaccctctacgggggcgggacagcagttcagtcactatcggatcggaggcacgctgggcgaggggggcttcggtcgggtttgcctggcctgggatgagcggctggcgcgcgaagtcgcgatcaagttctcgataggcgatgaatccggccaacgaggtctgcgctacgaggcccagcggctggccgcgcaggcgcaccgtgcttttgtaacggtctatgcattggaggagcacgccggtcagctggcgatggtgatggagcgcatccgcggcatcactctggcgcaggcgttggaccggaccggcgcgttgcccgccgagcgtgtgctgcgtctgggggcggcggtggccgaagccttggctgtggcccatcgccatggctgggcgcatggtgacctgaagccctccaacgtgatgctcaccgaatgcggggacgtgcgcatcctggatttcggtgctgctgcggccatcgaccccgagcagaccgtcagcacggtgactgcccagagcgcggcagggacgctggcttacctggcccccgaacgcctgctgggcgcgcgcgcgggcgcatccggtgacatctatgcgcttgggctggtgctgcacgaggcgctgaagggcagccgtgatttcgaggccagcgcggcgtggggcggattacatcgacgcctgcatggtggagcggcagggcgacggctgccgcgcggtaccgacgccgcgctgaccgatctggtcgagcggatgacgcgccgtcacgcgcaggaccgtccacgctccatgtccgatgtgcacagggcgctgctgaaggcgcaggagcagcggcacgagcgaagccgaaagcgtgcggagcagcgtggggtgctgggcttgatcgtgttgttcggactgctcgctgtgttcatccaggcgcgcgacgtgcgcctggcgggggcagaggctgtggcggaggccggtgctgcgatcgacccgttggtccgcgcggaacgcctgttggctgacttcgaccaggccggcactgtagccgaagcggtggcgctgctggagcagcgactggccagcgacccgcacgatgccggtgccgcagcgctgttggccatcgggtattgcctgagctacgccggtgatgagcgcgatgaggtctggttgagtcgcgcacgcgcggcagcccagcaggccgagcgtgaggaaccgcagcgggccatcgtgcaggcggcgcgaggctgggtggaggagtatctgaacaacaaggccgacgcagaagcccactatctgcgggcgcggatgctggacccgggcgatcgccatgcgttgctgggcctggcgcgcctgtacgcgcagtcgggccgcgcaagccaggcccagcaggtgctggccgacgccatgcggcggctccctgccgaccgcggctttgtcgacacccaggggacgctgctctaccagcagggcgacctcgccggtgccgagcaggcgttccaccgcagcatcctgctcaagcccaatggcgtgcaggcctacgtcagcttgagcggcgtgctgctgcgcgcgaaccgtctcgatgaggcgcttcatgtgctgcagcagggccttcggcagggcagcaatggccgcctgtatggcaacctcggcaccctgttgtacatgcggggtgactacgctgaggccgccacggcgttcgagcgtgcattgtccgatgcgaagggcagccccaacgactacctgaaatgggccaatctgggcgataccctgcgctggttgcctggccatgaagcgcaggcgcgcgcggcccaccagcgcgccctgcagatggtggacacgctgctgcagcgcagccctgacagcgcaacgctgcagagtcgcagcgcgctgtacgccgcccggcttggacaggcttcgctggcacggcagcgcatcgacgccgcactcgccggtggcaataacaatgcagacctgcagtttcgcgcagcgctggtggccgaacttggcggccgtcgcgaagctgcgttggctcacctgcaggacgctatcgcgcgcggctaccccccgcatatgatcgccggggagccggatcttctggctctacgccgggatcggcgctaccaccgcatgcttacagggaagacagaatga

SEQ ID NO: 535695 - DNA, 2184 bp, Stenotrophomonas maltophilia
atgccccctacttccgcgcgcatcccgcaccggctccgccgatggcgcgtcgctggctacgtcctgctgggcatctacctgctgtatctgctggccggcaacatcttcctcaacacgccactgttcgaccaggtcaccaaccgcaagccgcacaagttcgtgatgaccacgggcccagccctcaccttgctgcccggccacgtgatcgcctggaacgtgcacatgcgcggccacgtcaaccacaccgtctacgtgctgcatgccgaccgggcaagcgccaggctggcagtcctgccgctgttccagcgcgaagtgcgggttccgcgcctgcaggccacgggcgtctcggccgagatcagccgtgttgaagaggccatcccgccgcccccgcgcagcgaccagggctggacgctgcggttcgatgccatccacagcgacagcatccgcagcgcccgtttcggcaagctgctgatcatcggcaagggtcagggcacggtcggcttcgtcaagcagctgcgcggcggtccttcggaactgctggattcaacagtcacattcaagggtgcagacaccagtttcgagggcgtgcagctgctgggcgacatgaacctggctgcgcgcttcagctacccacgccactaccgtgaccaggcgcctgggctggccaaactgaagatcctgcatgcccagctggacgttgatgcacgcagccagggcctgcgtatggatacggatgccaccaccccgaagatctccagcgccccggtgccgggccgcctgcagctctcggcacacctgatcgatggtcagctgcaacccggcgaccgcgctctctggcaggtgccgctctatcttggcaacggggctccagaccgcggcgtgctggcccttcagctcaacgtggccaacgacctgcgcctgcaggcacgcctgccaccacggcccgactcaggcagcgaagtggacgcggacctgcacatcaccggccgtgaaatccccttccaggatccgggccagttgctggagcgcagttcaggtacggtacgcggcgaatggacattcacctcgctcaactggatccctgccctgttcgtccgcaagccgtggctgcaactggacggcggcggcacgctgaaggccgacctgcggctgcacaatggcgagctgagcgaaggcagcacggtggacattccctctgccgaagcagttgccgaggtcgccggcgtccggcttgccggtaccgccagcgcgcatggggaactgaagtcaggtactccgaatcaggcgctgcttgcggtccgcctgccccgcttcaccgcgcgtcccaccgatgccaaggacgttcggctgttcgacggccgcaatctggcgctggacctgaccggcgacggtcgtctgcaggaactgcgcaagggcgtgcgcgcgcacctgagcttcagcgaagccaccattccagatctgtccgcctacaaccgttatctcggttcaaaacaggtgcgcctgctgcgcggcaccggcttactcagcggtgatgccaccctcgataccgatggccgcgttggccatggcacggcccgcctgcaggggcgcggcaccagtgcgagggtggcagggctggacatgggcggcgatgtggacgtgaacgcaacgctgcgccggggcgacttcaaccagcgtcatttcgacctgtccggcaccacggtcgagctacgcaacgtgcaggtggccggcacggaacgctcgacggcgtggaaagggcgtgccaccttcagacgcggccgcatcgatgcgcaatcgcccttccaggtggacgccaccaccgacctggcgctcagtgatgcgcgccccttgctggcgttgttcgccgagcgcacggactacccgcgctggaccttgtcgctgctggactccggccaggtggatgcgcaggccaggctgcgctggcgcccgggccatctggtgattgatggcctgcaggccgagaatgatcggctgtcggtgcgcgcgcgactggatctgctggagcagcgcaagcgcggcgacctttatctgcgctgggggctgttgggcgcgggcatcgaactggatggcgaccagcgccagtggcacctggccaaggcgcgcgagtggtttgacgagcgcccttccctgctgccaacaggcactggcggatcctcagactga

SEQ ID NO: 535696 - DNA, 486 bp, Stenotrophomonas maltophilia; identical to SEQ ID NO: 504585

SEQ ID NO: 535697 - DNA, 258 bp, Stenotrophomonas maltophilia
atgctgcctgacagctgccagtttgaactgctggatgtggatgccctgcaggatcctgccagcggtcgtcttctgcacctgtactcgctggtggcccgctgcctttcctgcgaaacggtgttcaaggcagaggaaggccaagggttggtgagccattctgcagccagagtggtgcgctgccccaccggctgtggccagcaggccttcaagtcgtcgctgttgcgggcgtggcgcccgcaggccattgcccaggcttga

SEQ ID NO: 535698 - DNA, 2238 bp, Stenotrophomonas maltophilia
atgccttctgcccagtccacgcccgaccttgcgctgtcccgttgtgcgcgcgaacccatccacacacccggcgcgatccagccctacggtgtgcttctggtgctggagccgcagtcgttgcgggtgcgcgagcgcgccatcagtcagccgagcgtccttcagcagttcggcgagccgttgcttcagcacgtcagtgaggtactcggtggcgtgctggcgcccttccaggcgctgctccggcagaccaccatcggcagcagtgcgcatgtgggcgccgtgcacctggatggccacggccgccatcagctgctggtgcatcgctccgccaccgacctccttgtcgagctggaagcgccggttgcgggccagcccggttctcttgaagagctgtatccggccatccgcgagctgatgaccgccatcgaatcggcctcgacggtggaagacctgtgccagctggccgccgcgcacatgcgccggctcaccggcttcgatcgcaccctggtctatcagttcgacgccggctggaacggcatcgtggtggcggaagaaggcaatggcctgttgccctcgtacctggacctgcgttttcctgaatctgacattcccgcccaggcacgcgaactctaccgccgcaaccgggtgcgcctgatcgcggacaacaactacacccctgccccgttgatgcgggccgaggagcatcgcgacgcaccgccgactgatctgagcctggcggtgctgcgcagcgtatccccggtgcacctgcagtacatgcgcaacatgggcaccggggcgtcgatgtcggtctcgctggtccatgagggccagttgtgggggctgatgtcgtgccatacggtgcagccgcgccgcctgccctaccacgtgcgcacggcctgcgagttcatgggccagatcctgtcgctgcagattgccctgaaggagcgtgcgcgcgcgatcgaggaacgcgtggttcgccgttccgtactggtcaagctgctgggacgcatggccggtgacgaggacttcattgccgcgctgcgcctggatgagaccagcctgctgtcgctgaccggtgccgctggcgcggccatcgtgcacaagggcgactgcatgcgcgttggccggtgcccttctgccagcgacgtcctggcgctgaccgactggttgtccgcgcagcatgccggccaggaaatctactgcactgatcatctggccgccgactgggcggagggcgctcgcctggcggaggtggccagtggcctgctggcggtctccatctcgcagctgcatgacagctacctgatgtggttccgcccagaggtggtgcgtactgtcagttggggtggcgatccccgaaagaccgcagcgccggatgtcgtgctgtctccacgccattcctttgaggcatggaaggagaccgtgcagcagcgcagcctgccatggggtgacgccgatcgcgatgccgcgcacgagatgcgaaccgccatcgtcgacgtcgtgttgcgcaaggccgaggaaatggccgagctgaacgagcagctcctgcgcagcaacaaggaactggaggcattctcctattcggtcagccacgacctgcgcgcccccttccgccatatcgtcggttattcggagctgctgggcagctcggccggtgaacgcctcaacgagaccgagcgccgcttcctggacaccatcgtcgagtcggcaaagtccgccggaacgctggtggacgacctgctcagcttctcgcagatgggacgctccacgctgggacgggtgcggctggacatggctgcgctggtcggggatgtccgcaagagcctggcgctggactacgccggtcgcgatgtgcagtggacgatggcgccgctgccggaggtggaagccgacccgaccatgctgcgcctggtctggcagaacctgttgtccaatgcggtcaagttcacccgcgagcgcgaccaggcggtgatcgaggtcggccacgaacgcagcgacgatgaagatcacttcttcgtgcgcgacaacggctgcggcttcgacatgcgctatgtggacaaactgtttggcgtgttccagcgcctgcatcacgtcgaggaattcgaaggcaccggcatcggcctggccaacgtgcgtcgcatcatcggccgccacggcggccgcacctgggccgaaggcgaacccggcaagggcgccacgatccacttcaccctaccccgttccacaggagattacccatga

SEQ ID NO: 535699 - DNA, 468 bp, Stenotrophomonas maltophilia
atgagggacctgcggccgatcctcctggtcgaggacagcccaaaggatgccgaactgacactggccgcgttgtcgcgctgccagctgctgaatgacgtcatccatgtacgagacggcgccgaagcgctggactacctgcgctgcgagggaaagttcgccggggccaaccatggtggccccgtggtggtgcttctggacctgaagctgcccaaggtcaacggtctggaagtgctggaacaggttcgcggagatccgcagctgagcagcaccccgatcgtcatgctgacctcttcccgcgaagagcaggatctcgtgcgcagttacgaactgggtgtgaatgccttcgtggtgaagcctgtcgacttcaaggaattcttcgacgcgatccaggggttgggcatgttctggggcatcaccaaccagccaccgccacatcgcccctccggtacggggcagcacaatgcatga

SEQ ID NO: 535700 - DNA, 2400 bp, Stenotrophomonas maltophilia
atgcatgatggatcgcgcagcagcgagcgcctgcgcatcctcatgctggaggacagtgcgctcgatgcggagctgatcaccgcacagctgcagcgcgccggcctggacttcgaggccgagcgcctgtggacccgcaacgccttcatcgaggcaatcgacagccgaccgttcgacgtgatcctcgccgatcatgtcctgcctggcttcgatggcgacgctgcacttgccctggcacgcgagcgcgtgccacagacgcctttcatctttgtctccggcacgctgaccgaggagctggcggtccaggctctcacgcgcggtgcccgcgactatgtggtgaagcaacgcctgcaacgcttgcccgatgcgatccgccgcgcccgccaggaggcgcacgagcgcacccagcttgccaatgcgcaggccgcgctgaacgacagccaggcccagctgcagcaggtgaccgacgccgttcctgcactgatcgcccagctggacaaggaccatcgctacaggtttgccaacaaggcgtttctggactggcatggcttcagccttgccgaactgctgggccgcaccgcacgggaagtcagtggcatttctgcgtttgaacatgcgttgcccagcctggagcgcgtgcttcagggcgagcgctccagcttccaggtggagctgatccatcgcagtggccagtcacgattcgtgcagatggattgcgtgccggaacatgcggccgacggcagtgtggttggctacatctgcatggccagcgacgtatccctgctgaagcaggccgaactggcgctgcgcgaagacaaccaggaactggagcggcaggtccaggcgcgcacggccgagttgagggccagcaagcgtcgcctgcaggccattttcgaatccagcttccagcaccaggtactgctcgatctttccggcggcgtggttgatgccaacgtcgcctcgctggccgccgtgctggccgacaagaaggatgtggtgggccagccttatgtgcagtcgccgtggttcgccacgaccgacgaggttgccaccaccgttgatcaggccgtcaccgatgccgtgcacggccacagctcgctgcatgcgctggatatcgagctgccgaccgggcggcgcagtttcgacttctcgttccgccccctgctggacgcagacggtgcggttacggccgtggtctccgaagcggtggaaaccaccgcccggctgcaggccgaacacgcgctgcgccagtcgcagaagatcgaggccgtgggccaactgaccggtggcatcgcccacgacttcaacaacatcctgacggtcatctccggcaacgtcgaacacgccatgctgctcagcgagcgcgctggtgaaccggccgcgctggtcggtcgcgccctggacaatgccctgaagggcgtgggacgtgccgccagcctcacccagcggttgctggcatttgcccgccgccagccgttgcatagccaggcggccaacctcaacgaccgcctgctggacatgcacgacatgctgcagcgtgcgttgggcgaactggtgcaactggagatccgcagcgcccaggacatctggtgcgtggagatcgacgtcagccagttggaggcctctgtgctcaacctggcggtcaatgcccgagatgcaatgcctcacggtggccggctggtcatcgaggtcgacaacagccacctggaccatgactacgccgcgctgttccccgatgccgaacccggcgagtacgtgatgcttcgcgtgcgcgacaacgggcacggcatggatgcagccacgttggcgcgcgtgttcgaaccgttcttcaccaccaagcaggtcggccgtggcactgggctgggcttgtcgatggtgcacggcttcgtcaagcagtccggcggtcatgtcctgatcgattcggtggatggcggcggcaccagcatcaccatgatgttcccgcgctcgccgctggcgctgcccagcgaagcgcgtgcgccacagtctggcttggccggctacgcgccgcgtgaggaaaccatcctggtggccgaggacaacgacgatgtgcgcgcgcacacggttgattcactgcgcctgctgggctaccgcgtactggaagcgcatgacggaccgtccgcgctgcgattgctggagcgcccggacacgagggtcgacctgctgttctccgacgtggtgatgcccggcatgtcgggctgggaactggtccgcgaggtccgcgagcgctggcctgaagttgctgtgctgttcacttcgggctatccacgcgaccacgaggcggtgggtagtcagggtcggttcgctgcgctgctgccgaagccgtttacccgcagtgaccttgcacaggcggtacgcaccgcgctggacgctgccgcgcactga

SEQ ID NO: 535701 - DNA, 693 bp, Stenotrophomonas maltophilia; identical to SEQ ID NO: 504620

SEQ ID NO: 535702 - DNA, 672 bp, Stenotrophomonas maltophilia
gtgaatccgcaccaccatctgcacgaatccacactgatgagctacgccgcaggcgcgcttccggcgccgttgagcatcgtggcgggcgcccatctggagcagtgcccgcactgtcgccagcgcctgcgcgaggccgaggcgatcggatcggtcttgctggaacagacccagccatccacgggcgatctacgccgcgagcagttgcgcgacgcgatgttgatgcgcctggcgacggatgtgcctgccgcggcagtgtcatcacggaccgtttccagagagcgccccgaagccgatccggaccatcttcctgcgtcacttcacccgtatttcggcgcgtcgctcagtggtctgcgctggcgctggatggcgccgggcgtgcactgcatccgtgccgagcagatgccttcgctgatcatgctgaagattgccccgggcaagtgcctgccgatgcacagccacggccgaagcgagctgacccagatcctgcggggctcgtacaatgatgcgttggggttgttcgcgcccggcgacgtggcggacctggatggggacgtggagcaccagccggtgaccgcgccaggggtgccgtgtatctgcgtgtcggcgctggatgcacccctggtgttcagtggctggctggcgcggaaggtgcagcgtttcgtgaagctctag

SEQ ID NO: 535703 - DNA, 696 bp, Stenotrophomonas maltophilia
atgcgggctgcatccgattgccattcccgcgcgtacaggggacagaccttcacccgcccgccgcgaacgcagatgtatcctgacgccgccagcaccctcgccaacttcaacagcgcacgcatcgtgtccagctcccagcagcccagcagcgagccgaaaaactgggccggcgacatggacggtgtcgcgcggctgcgcgaccgcgactgtttcatgcggatctacgaccatttcatgccgcgcctgtgcgtctatctgcgcgggctgggcgcgcccgaggcggtggccgaggagctggcgcaggagtgcctgctgcgcctgtggctgcgcgcggccgactatgatgccgcgcagggtgcgttgagcacctggctgtaccgcatcgcccgcaacctgcatatcgaccgcgtgcgccgcgagcgcagctggatgcaggtacaggtggcggtggaagacgcggcaacgatggacgtggtcgagcgcagcagcgccgaacagttcgccgaccaggcccggcttcgccaacgcatcaatgagttgccggcagtgcaggcgcggctggtgcgcatgtcctacttcgaggccaagagccacagcgagatcgccgaggcactgggcatgccgctgggcacggtgaaatcgcacctgcggcgtgcgttcctgcaactgcagtcgaaagtgggaggtgcgctgtga

SEQ ID NO: 535704 - DNA, 768 bp, Stenotrophomonas maltophilia; identical to SEQ ID NO: 504621

SEQ ID NO: 535705 - DNA, 951 bp, Stenotrophomonas maltophilia; identical to SEQ ID NO: 514164

SEQ ID NO: 535706 - DNA, 1278 bp, Stenotrophomonas maltophilia
atgcgcatcgccatcatcggttcaggcatctcggggctggccagcgcctggtggctgcaggaacggcaccaggtgacgctgttcgaggccaacgactacctgggcggccacacccatacccacgacgtgcagatagacggcacgcgcatggccgtggacaccggcttcattgtcttcaatccccggcactacccgctgctgacggcactgttcgatgagctgggcgtggcctcgcagccgaccaccatgagcttttcgatgcacagcgagcgcagcggcgtggagtacaacgccacctcgctggatggcctgttctgccagcgacgcaacctggtatcgccgcgcttctggggcatgctggccgacctgcgccgcttctatcgggatgccccgctgttgctgggcgaggacgaaggcccaacgctgggccagtacctgcgcgatcagcgctacggcgaggccttcattgaagagcaccttctgccgatggcctcggcactgtggtcgtctcccaccgccacggtgcaggacttccccgcgcgctatctggcccagttcatggccaaccaccagatgctgcagatgaccgggcggtcctcctggcgggtcgttaccggcgggtcggcccgttacgtggatgcactgcgccgccgttggcgggtgcatgagcgcctgcagtgcccggtgcagcgggtggagcgcacgcctgagggcgcacgcgtgcacagtgccgccggcgtcgaagccttcgacgaagtcatcctggcctgccatagcgaccaggccctggccctgctgggtgatgccgaccccgtcgagcgcgaggtgctgggtgccatccgctaccaatccaacgaagcggtactgcataccgatgcctcgctgctgccacgcaaccgcaaggcctgggccgcctggaatgcacatgtaccgcgggatccaaccgcgccctgcacggtcagttactgcatgaacctgctgcagggcctgcccggcagcacgccattggtggtcaccctcaaccgcagcgaagccatcgacccggccagggtgctgcgcacgctgcactatgcacacccggtgcacgatcatgctgcggttcgcgcgcagcagcgatgggcagacctgcagggccatcgccacacctggttcgcaggggcctactggggctggggcttccatgaggatggtattcgcagcgcccgccgcgtggtggatgcgctgttggcctgcgcaccgcatcgccaggtatcgctggcgcgcgaggtggcggcatga

SEQ ID NO: 535707 - DNA, 768 bp, Stenotrophomonas maltophilia
atgagcgccagcgcactctatttcgggcaggtgatgcatcgccggcatcacccgcatccgcatacgttccgttatccggttgcacaactgctgctcgacctggatgaactagagaccgtgtttgccgggcgctggctgtggtcggtcaatcggcgcaaccttgccgagttccggcgcagcgactatttcggcgatcccgcacagcctctggcagacgccgtgcgcgaccatgccgcgcagacgcttggccatcgaccttcggggccggtacgcctgctgacgcaccttcgctttgccgggcatgtgttcaacccggtcagtttctactactgctaccaggccgacggcagttcgctggactgcatcgtggccgagatcaccaatacgccctggaaggagcggcacgcgtacgtgctgccggtcgccacggccgtccacgaaggtgcgtcactgcgttggcagttcgacaagcgattccacgtctcgccgttcatgccgatggactgccgttacgactggcgcttcaacagccccgatgaggacctgcgtgtgcacatgcaggtctggcgagacggcattcgccagttcgatgccacccagacgctgcaacgccgccctctggatggccgcggcctggcgcgggttctggcctgctatccactgatgaccacccaggtggtggccgccatccactggcacgcactgcggctgtggctgaagcgcaaccccgtacacgaccaccccacccttgccgggaaaccgcgatga

SEQ ID NO: 535708 - DNA, 1260 bp, Stenotrophomonas maltophilia
atgaactcgatgacaccttcggtgaccctgccgcgccccagcgcgctggacgccttcctgcgccgccggctgctggcacagcttgcccccctgcgtgatggccacctgtgcgtgcgcgatgcccttggcgaggtccggctgggcaacgcccatgccgggctgcaggtgacggtgaccattgatgacccggcgttctaccggaaggtcgctgcgcagggcagcgtcggcgccggcgagagctacatccagggcgaatggcactgcgatgatctggtggctctgatacgcctgctggtccgcaaccgcgacctgcttgatggcatggagcagggcccggcccgtgtggctggctggctgctgcgcggctggaaccggctgcaccgcaacagccgcgagggcagccggcgcaacatcgccgcccactacgacctgggcaacgatttcttcgccctgttcctgtcgccggacctgatgtactcgtcggcgctgttcaccagcgaatccgaatcgctggagtctgcctcgcgccgcaagctggaccgcatctgccagcagctgcaactcacgccgggtgaccgggtggtggaaatcggtaccggctggggtggcttcgcggtgcacgcggcgcagcactatggctgccacgtcaccaccaccaccatctccgccgaacagcatgcgctggccgtcgagcgcgttcgggccgccggcctgcaggaccgggtcacgttgctgatgcaggactaccgtgacctgcagggccggttcgacaagctggtttcgatcgaaatgatcgaagcgatcggcgccgagtacctggacacctacatggccacgctgcagcggctgctgaagcccgatggcgttgccctgctgcaggccatcaccatcgaggaccatcgctacgagcaggcccggcgcagcgtcgactacatcaagcgctacgtgttccccggcagcttcattccctccatcaacgcgatcatggcggccaagacgcggtccagcgaccttcagctgatcgcccagcaggatttcggccattcctacgcgctgaccctgcgcacctggcgccagcgcttcctcgcacagctgcccgccgtgcaggcacaggggttcgatgcgcgcttctgccgcctgtgggacttctacctggcctactgcgaaggcggcttcctggagcgttcgatcggtgtttcgcatctgctgctggcgcgcccgggccatcgacccgtggtcccggctggcgaaggcaactga

SEQ ID NO: 535709 - DNA, 549 bp, Stenotrophomonas maltophilia
atgcgccggttctgggccaacctgcttggcaaccagctggtctggctgtgcgcggtggctggtgccgggcgcggctggcagtggcccgcgttgctggccgcgtcgctgtatatcggcagccagctgctgacgtcggcgcatccccgactggacctgcggctgctgctgctagcgttggcctgcgcctggctggtcgacgccagcgccgccgccagcggcaccgtgcgctacgccgctgccccgctgggatgggcgccgccgccctggatcatggccttgtgggcttcattcgccatgaccctgagcacctcgatgcgcttcctgcagcgacaccctgccctgccgcccctcttcggcctggtgctggcgccactggcctacctgtcggccgggcgtggattcggcgcggtgcagttcaacagcccgacgtggcatggcgtcctggtcctcggcacgggctgggccattgcgctttccctcctgtgccgcgccgcccttggcggcacgcgtactacgccacaaccccctctcgccggagcgtcatcatga

SEQ ID NO: 535710 - DNA, 786 bp, Stenotrophomonas maltophilia
atgatcaacctgctctgggtgctgctctacgcgctactggtgatgagctggggttggacctggcagcgccgccaccacaacatcggcgttgtggatgtgctctgggccaaaggcgtggctgccgccgcgctgttgctggcgctgctgggcgatggtgcggtgacgccacgggtggcgctggctgtgctcggcggcctgtggggcggtcgcctggcccttcatctctggcatcgggtccggcacgaagcagaggacgggcgctatcgctacctccgagagcactggcagggacaccagggaaagatcttcgcgttcttcatggcgcaggcactgctggtggtgctgtttgcgctgcccttcgtcgcggtcgctgccaatcaagccgctggcacccccccctgggcgttggcggccgcgttcgtctggctgctgagcgtgggcggagaagcgctggccgaccgccagctggcccggttccgcgcgaacccggccaacaaaggccgtacctgccgtgatgggctctggcggtattcccgccaccccaactacttcttcgagtggctgcactggttcacctacgtgctgctggccgtcggctccccgctgtggtggctggcctggctcggccccgtgctgatgtatgtattcctgcgctatctgagcggcatcccgttcaccgaaaagcaggccctgcgcagccgcggcgacgactaccgcgcctaccagcgcagcacgccgatgttcttcccctggttcccccacccttccaaggagcattccgcatga

SEQ ID NO: 535711 - DNA, 1074 bp, Stenotrophomonas maltophilia
atgagcgcgataccgtcactgaatccggccgaggaagcagaaaccgggctgaccgcctgggccgaacgcggcctggtgccggacgctgcgctgcgtgccggtatccgacggctgtgcgcgcagcgcctgcaggaagaatcggcaggtggtatcgaagcgcagtccgcgcgcttcgcccgccgcatcgccgaactggccgacagcccgctggcactgcataccgatgcagccaatcgccagcattacgaagtgcctgcggcgttcttccaggcctgcctgggcaagcgtttgaagtacagcagctgctactaccccaacggccacgaaacgctggaccaggctgaagaggcgatgctggagctgtacggccagcgcgctggcctggccgatggacagcacattctcgaactgggctgtggctggggctcgctgacgctgtggatggccgagcgctacccgcgcgcaacgatcacggccgtgtccaactcacacagccagcgcgaacacatcatggcccaatgccaggcgcgcggactgcccaatgtggaagtgctcacccgtgacgtgaaccagctggaactgcccaccgcgcagtttgatcgctgcgtttcggtcgagatgttcgagcacgtgcgcaactacgagcgcctgctggcgcgcattgcacagtggctgaagccggacggtgcgttgttcgtgcacatcttcgcccaccgcacgctgatgtacccgttcgaaaccgagggcggcgacaactggatgggccgccacttcttcaccggcggcctgatgcccgccgccgataccttgctgcatttccagcgcgacctgcggctggatcagcgctggttgctggacggcacccactaccagcgcactgccgaacactggctggccaatcaggacgcggcacgcgatcgggtgatgccggtgctggcggcgacctatgggcctgcggctgcgcgcatctggtggcaacgctggcggatgttctggatggcgtgtgccgagctgttcggttacgacgatggccagcaatggctggtggcccattacctgttccgtccccgttga

SEQ ID NO: 535712 - DNA, 534 bp, Stenotrophomonas maltophilia
atgcgcatgttctcgctgcttccgctgatcgcggtcggcctgttcggctcgggctgctcgtccagcgacacccggccacttccgcgtgcgccctcggtggatgtgccgcgcttcatgggcgactggtatgtgatcgcccatattccgtcctggcccgagcgcgaggcctacgatgcggtggaaagctatgccctgaagccggacgggcgcatccagaccaccttcacctatcgcaagggcagcttcgatgccccgccgaagtcgatgcatcccatcggccatgtcgaagaggaaggccatggcgcagtctggggcatgcagttcatctggccgatccaggccgagtacatcatcgcctggctggatgacgactaccgacagaccatcgtggcgcgcagcaaacgctattatgtgtggtacatggcgcgcacgccccaggtgtccgatggcgactaccagaaggcggtgcagcgcatcgccgacatgggctacgacatccaccaactgcggcgtgtgccgcagtccatccggtag

SEQ ID NO: 535713 - DNA, 510 bp, Stenotrophomonas maltophilia
atgatgggcagccacgcagaggcgacatggaacgggcttgaagtgcggcagatccgtgcgggcgacctggatgcaatctgcgcccaccgcgaagccatgttccgcgatagcgggcgaaccgaggaggtcctgcgggcgatggcggctcctttccgttcctggctggcgccgcgcctggcttctggcgagtacttcggccatgtccttgcagaccacggcagaaccatcgccggcatcggcctgatgctgatcgactggccgccccaccctgcccatccggaccagggctaccgcggctacgtcctcaacgtctacgtggaaccggagtatcgccgccgcggtatcgcccggaagctgatggccctggcagacgacgccttcaccgaacgtggcgccacttacgcagtgctgcatgccaccgcgcagggggcgccactgtacgccgaccttggctgggctggaaccagcgagatggcgcgcagcctgcacggcaacgatcagacaccatga

SEQ ID NO: 535714 - DNA, 627 bp, Stenotrophomonas maltophilia; identical to SEQ ID NO: 504623

SEQ ID NO: 535715 - DNA, 2325 bp, Stenotrophomonas maltophilia
gtgagaacggccagtcgaatgcgcctgcacatgccggccctgctgctggcgctgcttctgttgcctgtggcttccgcagaagacgcgccaatccggccatgggagtccggccgcgaggtccgggtggccaccgcacccgccctgcgccagatgcccgccaccctcgctgattcggcgccgatgccgagccttgcacatggctatgccagccttgtggaacgacacgcacggctgcgcttcctggagcaggcctatcccagcggcagcgcctcggttgtcgcggtctgccagcacaaggccgatctggtactggtaatggggcagtcccgccagcagccacgcccgtgccccgggctgctggagtcggtcgcgtttcccggaggaagaaccatgctggccggacgcgccggccaacccctgccgcacgatatcgtggagttgggaacaagggtgctggccgtcgtcgaaggcgggccctacgccgattggcttgccctgcaccatcccagcatcaagcggctgcacctggccgatcggcatgccgcgctggcggcggtcgagagcggcatcgccgacgtcgcaatcggcctggaaacgaccttgcggcccctgatccgccatcacttccgcgggcaactgcagcttcagcggttcgacagcgacttttccaccgaccttcacctgcttacgcgcaacgaggaccggcaactgctgttgcgcatcgagcagggcctgcgcgacatcacactggaagaacatgccagtctgttgcaggcatgggctcagcaggcagtgccagcgaccgtcgagcgcgcgttggactggatgcgcgcgccctcttcgccctggctgctcaccctgcttgccacgctggccggcacccctctgctgtggcgcgcggtgcacagccaccgggcccgcaagggacggagccacgcgcgcgcagtcggcatgatcagccacgagatgcgcaatgctgcgcaggccgtgctggcctcgatcgacctgctcggccagtctccatcgcccaagcggcagcgtgagctactcgcggccgcgcatgcggctgggcattcgctgcgtggcctgctgaatcgatcgctggaattctcacgattggccagcggaacctacagaccccaggcacaaccctgcgacattgcccggctctgccgtcaatcgctggatgccctgcggccacacgcgcgacagaaggggttggcgcttcgcttcgagtgccagcccgaccccgccccggctgttgcgcttgatcgggaggggtttcgccagattgtcggcaacctgcttggcaatgcgttgaagttcaccgatatcggcggcatcgagctacgcctgcaattgacaccgcctgaccatccgcaggagctgctgctggatgtgatcgacagtggcatcggcatcccggccaggcagatgccccttctttttcgcccgttcgaacagagtgaaggcgggcaggcgcgcggcggtagcgggctgggcctgatgatcgcgcatgaactcagccgggcgatgggcggcaatctgtccgcgcacagcgtgcatgggcgtggcagtcgcttcaccctgcgcctgccggtgcaggcagtcagcaagagcgaagggccggtcggcacgcccgaaagcgacacgccactggctggactcgacctgctgctggtcgaggaccatgcgctcaatcgccggatcatcggcgagcagctgcgacggctgggcgccgacgtgcgcgcgcttgccgacggcgccagcgcgctcgccgagcaggccgcacaaccgcgcagcgtggtgctgctcgacatcgggctgcaggacatggacggctatgcattggccacacagctgcgccgtcaggcacaacagccattgcgactgattgcgctatcagcaaggaaggggccccggcacgcaatacgcgcccgcaaggctggcttcgatgccagcctggccaagccgttgcaggtcgcggacctgctgctggcactggacctgcccattgacggctacaccgagcggtccgtagcccctgcctgccgggatctgatctatcgggaagacatccgccacgaactggcgcagattgaacaggccgtggaagccgctgatgcagcctccctctgccaccatgcccatcgcctgcagggcgcactgcagatgtgcggcgccgccgcgcaggccgacactgcggccgacctgtgggacctggctggcgagcccacgcccgactgggtcgatgcgcgacgcctgctgcaagccctgcagcaatggcatggctcccgcactgcggaagccatgcccagggcctga

SEQ ID NO: 535716 - DNA, 756 bp, Stenotrophomonas maltophilia
atgaccaccaccagcgacaccaccaccgaagcggcgccgagcaacgcccccctgttctacacccgtccggtgccgctgcaggccgatgtgcatgccgacctgcgcatcctgccgggcaggctcgagtttgccgcgggcaacaacgccattccgctggtgctcggcgagttctcgctggcactgcaccacttcccgatcctgttcgctggcccgaccgcggtgccgatggccgccgttggcgtgtccgaccagaacctgttcatcaaggacggcctgtgggaagacgaggcctatatcccggcctatctgcgtcgccatcccttcatcttcatcgacaccggctcggacaatgatttcctgctgggcatcgacgaagagagctcgcgcgtggtcaagggcggtgacgaaggccagccgctgttcgtcgacggcaaggccaccgacatggtgcagcaggcgcttgagttctgtggccagttcacccgtgagcacgaacagacccaggccttctccaaggccctgatcgacaacggcctgctggtcgagcgcaatgccaccgtgcgtaccccggatggccgtgagttcaacctcaatggcttccaggtcgtcgacgtcgagaagttcgtcgcgctgccggaagccacagtggtcgagtggcaccgcagcggctggctggccctgatccaccagcacctgatgtcgctgggtcgcttcaacgacctgacccgtcgccaggtcgagcgtctggcggcctga

SEQ ID NO: 535717 - DNA, 273 bp, Stenotrophomonas maltophilia
atgcgtgatgacaaagaccccggaaccctggagctgaccctgccgcgaaagcgcggtcgtccgcccaagttcgggtacgccatgagtgatgcgcagcgggccgcacgctatcgcgcgcgccgggcggggcaggccaaccatgccgatgtgcgttcctgctcggacatggtgctgctggacaagatccgcgcggcggtcagcgcccgcgacactgagctggccggtttcctggtgcatgtgctctggcagcggtaccccctgcagctgagatag

SEQ ID NO: 535718 - DNA, 2037 bp, Stenotrophomonas maltophilia
atgaacacccaagtcctttcccgccgtcgcaaccttggcatcattgcccacatcgacgccggcaagaccacgctgaccgaacgcctgctgtggaaaagcggcgagatccatcgtgtcggcgaagtacacgacggcaacgcgaccaccgatttctcggcgatcgagcgagaacgtggcatcaccatcggcgcggccgccgtgcaggcgcagtgggcgccgcgcgacctgccgccgcatcggctgaccctgatcgatacgcccggccacatcgacttcgccattgaagtcgagcgttcgctgcgcgtgctcgacggcgccgtggccgtgttctcggccgtagacggcgtgcagccgcagtcggagacggtgtggcgccaggcgcgccgccatcgcgtgccgctgatcgccttcgtcaacaagatggatcgcgtcggcgcctcgttcgagcgcgtgctggagcagttgcagggcaagctgcaggcacgcccgtgggcgctgggcgtaccgctgggcagcgaaagcgcgttcaacggctgggtcgatctggtcgatgagcgcgtgctgcagtggcaggagggcgacgcaaccacgatgaccccgtgggacgacgcggtgcgcgtccagtggcaggcacagcgcgatgcgctggtcgaagccgtggccgatcatgacgaagaactggccgatgcctggctggaagggcgcgttatcgatgccgaacagctgcgcgcagcgatccgtcgggcgacgctggcgggtgcgggcgtgcctgttctggccggtgccgcgttcaaggacaagggcatcgagacgctgctggacgccgtggtcgattacctgccatcgccgttggaccggcctgcggtgaccgctgaaagcgagcgcggcgaggtggtactgccgccggacccggatggtccgctggcaggcttgctgttcaagatcacccatcagcagcacggcgccctcagcttcgtgcggctgtactcgggcaccttgaaggtgggcgacgcggtggccagctcgcagcatccgcagggcaggcgtgtcagccggctggtgcgggtgcaggccgaccagacccatgacatcgaacaggccgtggccggcgacatcgtggcggtgctgggctggaaggatgcagtcagcggtgaaacgctgagcggccgtgcacagccgctgcgcctggagaacatccaggctcaggcgccggtgctggcgtggcggctggagccggcgcgtgcggccgacctgatccggatggcgcagggcctggccagcctggcccaggaagatccctcgttccgcgtcgaaaccgaccgcgacacggcggagaccctggtctggggtatgggtgagctgcacctggaggtgatggtcgagcgcctgcgcagcgagtggaaggttgatgtgggcgtgggtgcgccgcgcgtggcctaccaggagacaccgatgcgcgcgatgtccggtgtagtcgggcgactggtcaagcagaccggcggccagggccagttcgcgcacgtggtgctggatgtggcgccgcgcgacgacgaccaggtggtgttcaacgaccgcatcgtcggtggcgtggtgccgcgcagcttcatcgcggcggtggagaagggcgtgcgtgccgcgctgtcggagggtccgcagggccatccggtggtcggtatcgaggtcagtcttgtcgatggccagacccatgcgaaggactcctccgaaatggcgttccatcgcgcgggtgccgaggcgatcaaggcggcgctggccgagggtggcacgcagctgctggagccggtgatggcggtgacggtgcattcgccgtcggcgtcggtgggtgacgttgttggcgacctcaaccgccgccacggccgcatcacccgcatcgacgaccaggaaggtcgggctgaggtcagtggcttcgcgccgttggcgcagctggtgggttacaccacctcgctgcgttcgctcagccagggacgcgccagcagcgaagcgcacctgcatggctacgagccggtgcgggttgcatga

SEQ ID NO: 535719 - DNA, 750 bp, Stenotrophomonas maltophilia
atgatccgtaccgttacgcgcggcgtgctgcttgctgcgatggttgcttcggtgtgcgctgccaatgcagcgtcgacctcccaggtttcgctggccaatgcggccgagaacgcctcgctgatcgagacccggcatgccactggcgagggcgctgccgtcacctcgatcaggacgcagtacttcgccaacgaggaaatgtcggtgagctgggacgaccagcaggtgctggtgctgtgcaaggaggcggcgtacctgaagattcctgctgccaaactggagggcggtgcgctgaccaccgagcagcggcagatgatcgtctatcaggcgctgatgtccggtctgggggctgtcgcgggcattgtcgggccggcaggcgaagtggtggccgtggccgatgacggtagcgagacccgcagcgttggcgaaaatagctgggcctacggtgttgagcgatacgaggtgatcacccagcggctgccggacggtgcacttcgggtccggacccgcaagacagagaccgtgaataccacgcctccggcgggcccggacgatatgttcagcaccgaggacgaccaggcggcgcgcttgtccgaactggcgccggtgggcagctggaccgaagtagtggtgcgcggtggcgcgcgccagccgcatgtggatccggcgatgtcgctgcagggctgggtctcgatgggggatgaccgggctgcaacggtggccgaggcgcgcaagctgcacggctgcaagtga

SEQ ID NO: 535720 - DNA, 762 bp, Stenotrophomonas maltophilia
atgagcgtgttgctgaagctgcacgacgtggtggtgcgtcgccagcagcgcgtgatcctgcatggcatttcgctggcgttcgagccgggtacggtgacggcgctggttggcccgaatggcgcaggcaaatccacgttgctggcggttgcggccggcgatctgcgcgccgatgcgggcgaggtgagccttctgggcaagccgctggccagctacaaggccgggccactggcacgtgagcgcgcggtgatgccacaggagcacggcgtacggtttgccttcagtgtcgaagaggtggtggcgatggggcgcctaccgcacccgccggacgcggtggccgatgatgcccaggtggaagcggcgatcgatgccgctgaactgcaggcattgcggctgcgcgaagtgcagcagctgtccggtggcgaatccgcgcggaccacgttcgcgcgcgtgctggcgcaggacaccccgttgctgctgctggatgagccgaccgccgcattggacctgcgccatcaggagcgtacgctgcgcagtgtgcgtgcctgtgccgaggcaggtgcctgcgtgatcgtggtgctgcatgacctgaatctggcggccggctatgccgatcgcatcgtgctgctggagcagggcagggtggcggccgatggcacgcccttgcaggtgctgaccgaagacaacctgcagcgcgtctaccagcaggatgtagtggtgctggagcatcctcggcgcggggtgccgctggtggtggttgcctga

SEQ ID NO: 535721 - DNA, 999 bp, Stenotrophomonas maltophilia
atggtggcgttgctggcactgctgggggcagtgctggcgtcgtttgccgtggggccgctgcgcttgccgccgctggaggtgatgcaggcgctggcggtgaagctgggcctgctggatccgcaggcagtcagcagccgcgatctggccgtggtctggcaactgcgcattccgcgtgccctgctgggtgcgatggtgggcgcgtcgctggcgatggccggtgccagcctgcagggcctgttcggtaacccgctggcggatccgggcatcgtcggtgtcagccagggtgctgcattgggtgcggtggccgccatcgtgctgggcgcggcgggcgctgcgggttggctggtgccggtggccgcgttcgccggcggtgcgctggcgatcggcctgacgtatgcgttggcccggcccggcaagggcatgggtaacgccacgctgctgctggtcggcatcgcgatggccgcgttctgctcggcgctgattggtttcctcacttacatcgccagcgaaagcgaactgcagtcgctggtgttctggcagatgggctcgctggcgcgtgccaactgggccgacgtggcggcggtggtgccgttgttcgccattggcgtgtgcgcattgcagcggctggccacgccgctggacatgctggcgctgggcgagcgccaggcacagcacctcgggctggatgtggcccgcacgcgtcgtcgcctggtggcgttcagtgcgctgctggtgggcgcggcggtggcctttgccggttcgatcagcttcgttggcctggtggtgccgcacgtggcgcgcctcctggtcggccccggccatcgctggctgctgccactgtccggcctgctcggcgcgctgctgatcgtggtggccgatactgcagcccgcacgcttgatccgccggcggagattccgctgggcctgttctcggctgcgctcggcgcgccgttcttcctctggctggtgctgcagcagcgccgcaaggcgacgccatga

SEQ ID NO: 535722 - DNA, 1047 bp, Stenotrophomonas maltophilia
atgaacatcgcgtcccgtctgcgcctgtgtgcgcttccgctggctgtttcgttggcgctggctgcctgtggcggaccctcggctccttcggatgccgcgaagcctgtcgagccgtcggccacagcgtcggctgcggaaaccgcgttgccggcaggctggcagcgcgtggccggtgccaagatgccggcggtgcacgaccagaaggccgtgctgccggccaaggtgcgttccgatgatggcgccgacgtccaagtgaccgacaccagccggatcattgccggtggcgacgatgtcatcgcggtgatcgaggcgctggggctgggcaggcaggtgttcgctgcgcccaccaacaccaccacccaggctggcctcgccgcgccgcaccagttcctgttcaaccgcaccacgggcgtggaaggcgtgctgagcctgaagggctcgctgttccttggcaacagcctgcgccgccacaccgagctggcgaaaaagctgcgcgaggtgggcgagccggcggtggtcatcgatgacctgcagccggcgccggacaaggtgcgcaaggtcgccgcggcactagggctggccgaagcggggcaaacactggccacgcaggtgcagcggcagctggacgaggctgcagcgattggcaagggcctgggccatgcgccgcgagtgatccacgtctcggccaccggcgccggtggctctccgaccgtcgccggtgccgacagtgcgtcggcgcagctgatcgcactggccggtggcgtcaacatcggcaccgaagccggggtgaagaactactcgcagctgagcaacgagggcgtagtcgctgcggcaccggaggtgatcctggtgaccgagcatgacctgcagctgttcggcggcgccgagggcctgtggaaggcgtacccgacgttgaagcagacgccggccgggcaggccaaccgggtctgggtgatgccggatgtgcagctgaagtacaccagtgtcggttccggtgctggcgcactggcgctggccaaggccctggcggcgttgccgaaggcatga

SEQ ID NO: 535723 - DNA, 1377 bp, Stenotrophomonas maltophilia
atgtcgttccgtccgtctttccgtctcacctctctcgccgccggcctgttgctggcggtgactgccaccgcgcaaccggtgttcgatcagccggccaacgccaccttcaagggtgaggtcgtctcacgcggtgagaacgtggttcccggaagcaccgccgaagtggtcggtcgtggcttcgtgcccggccagaaggtcagcctgctgcgtggcgacagcgtgctcaacgcacagccggtggtggtcgatgccgatggcaacttcaagacccagctgagcattccggccgatgcggtacctggtacccacccggtggtggtgcgcgccagccagccggccgcggccacgctgctgaagctgcgtgtgtcgccgcagctgccgctgtcgggccaggcgcagttcgccacccagtccaacaagctggtgccgggcctgtaccagtccgcctacagcgcggccagcaatgccgtgttcgtcacctcggccgtgggccgcccgccggtgacccagtcgcagctgctgaagctggacccgaagaccctgaaggtgaccaaggcgatcaccccggcgcaggtgccaggcagcaccaacggtgcggtgtacgcggtctatggcgtgggcgtggatgacaccaacggcaatgtctgggtcaccaatacccgccagaactcgatcgcggtctatcgccagaaggacctgtcgctggtccaccagttcccggtcgacaccgtgccgcacgcgcgcgacgtggtggtcgacggcgcccgcggcaaggtgttcgcctcggccacgggtgaggaccacctgtcggtgttcgacgccaggaccttcaaggagctgccgcaggtgacgctggaatccggcgtcgatgacggcaagttcaccccgatgagcctggtgctggacgagagaagcggcaagctgttcaccgtcagcatcggtacgccggaagcagcggtgattgatgtggccagcgggaaggtcgacaaggtcatcgacctgggtaattcgatcagcgcctcgggcgtggccttcgatgcggcgcgcaaccgcctgtacgtggcttcgcagggcaccgacaacctgctgatcgtcgatgtggccgccggcaaggtgctgcacgatgtcccggtcggcgccggtgcgctgaacgtcgccttcgatgatgcctccggcctggcctatgtcagcaaccgcggcgccggtaccgtcaccgtggtgaacggcgacggcaaggtggtcgccaacctcgacggcggcacgctgccgaaccatgtccgtgccgatggcaagggcaatgtgttcgcggtgaacaagtcgcgcggcgccgaagatccgaagggtgatcgcatcacccgcatcacccccaagcagtaa

SEQ ID NO: 535724 - DNA, 1029 bp, Stenotrophomonas maltophilia
atgaagcatttcgtcccgctttcgtgccgtggtccgctggcccgcggcttggccgccttgatgatgggtctgctcctggccaccccctacgcccatgcgcagcagcgcaatccgctgcagaagatcggccacaccgtgctcgacgagccggcggccagctatcgcttcgagcagttcgtggtggacagccccgaccagcaacgccgctggcgggtgaatgtggcgatccctgccaaggccggcaaggcgccgctgccggtgctgtacgcgctggatggcaatgccgtggcgatggtgctggaccagccgatcctggccgagctggccgcgcgcaaggcgccgccggtgctggtgctcatcggctacgacaacgatctgcgcatcgattcgaaggcgcgcacccgtgactacaccgcgtggatcgaccgcgccgacgacgagagcggcagcacgcaggcagttggcggcggtgcagcggccttcctcgatgtgatcgagcgccgcatcaagccggaagtcgagcgccgcgcacgcatcgatgcgcagcagcaagcgctgtggggccactcgctggggggactgttcgtgctcaatgcgctgtacacccgtcctgccgcgttccagtcctatctggccgccagcccgtcgctgtggtggagccacggcgctgcgctgggcgatccagagcagcagttcgtgcagaacgtgcatggccagccggcgaagctgtggctgatgctcggcggtgccgagcgcgttggtgatcgcggcaagcgcgacatgaacaacccgcgcgtggtcgcgcacctgcgccgcattggcggtgccacgccggatgcagccatgcagttgtccgagcggctggccagggtgccgggactgagcgtgcagtaccgcgagttcgagggtctgggccacggcccgatgctgccggcctcgttccacgcggcgctgcacgagctgtacggcgtgaccgatcgcagtgccggtgacggcgccgccccgggcggtgacaacgccgccgaatga

SEQ ID NO: 535725 - DNA, 390 bp, Stenotrophomonas maltophilia
gtgcaggaaatgattctgccgttgaagcgctatgcccagttcgagggccgcgccaaccgccgcgaatattggatgtaccagctgttcctgttcctggtggcgacggcggtgatgctgctggccggcgtgctggcgatcctgctgcgcaacagtcccgatgcgctggccggcatcctgatcggcatggtggtactgctgtgtgtgatgtggctggcgacgatcgttcctctgatcgcagtgaccgtacggcgcctgcatgactgcaatcagtcgggctggctgttcctgctggcgctggtgccgggcggtggaatcgtgatcatgatcttctcgctgctgccgggcacgccgcacgagaatgtctatggtccggtgccttcggggccgtga

SEQ ID NO: 535726 - DNA, 408 bp, Stenotrophomonas maltophilia
gtgctgctggagagacgggtcttcaaagctggaccgtgcctcagccaaccggccgctgtacgggactacctgcgtctgaaactggtcgctgagcccaatgagatattcgccgctgtgttcctggacagcctgcaccaggtgctggcctacgagccgctgttcaggggcacgatcaacgcgacttcggtctatccgcgtgtcgtcgtgcagcgtgtgctggagttgaatgccgccgcggtggtcttcgcccaccagcatccttcgggcgtctccgagccgtccagcgcggatcgcatgctgacccagcaactgcaagccgcgctggcgctcatcgatgtgcgggtactggaccacatcatcgtcggccagggtgccccgttctcctttgcggaatccggcctgctgtag

SEQ ID NO: 535727 - DNA, 2505 bp, Stenotrophomonas maltophilia
atgaatcaagacaccacgacatcaccaacggccgcttgggggcagttgctgtgggacccgttgcgactatcggcgatggcaaacgagtatgcagtggatgcctggcagcggtccattctgtatgccgacgttcgccgccaacgcggcaaccagtaccaggagcatttgcaggagcagacgccgaacgtactcgacttcgcctctgaggtcatcatgtccgggctggaccttccgcagccggtcaactatggcctcgtacgtatcctgccgccagccgacacgccgagcgatccccacaagcgaccgttcgtggtggtcgatccacgagcgggccacggcccaggcatcggcggcttcaaacccgatagcgaggtcggcgcggccctcaaggctggccatccctgctacttcgtaggctttctgcccgatcccgttcccggccagaccgtcgaagacgtcatgcgcgccgaagcggccttcgtgcgcaaggtcggcgagctgcaccccgacagccgcggcaagcctgcggtcatcggcaattgccaggcaggctggcagatcctgatggcagccgccgtctggcccgaactgttcggaccgatcatcgtggccggtgcgccgctgtcgtactgggcgggcgacatgccgatgcgctacgcgggcggtctgaccggcggtagctggttgacggcattgaccagcgacctaggagctggtcggttcgatggtgcctggctggttcagaacttcgaaaacctggacccggccaatacgctttggaccaaacagtacaacctgtacgccaatgtcgacacggaaggcccgcgctacttgcagttcgaaaagtactggggcggccacgtcttcctgaacgatgtggaaatacagtacatcgtcgataacctgttcatcggcaacaaactgagtacggcgcagctggtgacgtctgatggcgtgcgcatcgacctgcgcaatattcgctcgccgatcgtggtgttctgctcctatggggacaacatcaccccgccgccccaggccctgggctggatcaccgacctgtaccgcaacgacctggacgtgctgggacatgaccagaccatcgtctacgctacccatgacagcatcggacatctgggaatcttcgtctccggcagcgtcgggcgtaaagagcaccaggagttcgctgagaacatcgacatcatcgacgtgctgccggcaggcattcaccacatgcaaatcgatgagcatcccgacccagtgcaggaaggagacccaaccagtgacgtcttcctgacgcggattcgccgcagcagcatcgatgaagtccgtgagatcgtccgtcccgaccctgagaacgatcgccggttcgccgccgttgcgcggatctccgaggtcaacctggcttgctaccgcagcttcgtgcagccatggatgcgtgccctggtcacggaccagggtgcgaagtggctggagcagctgcatccgctgcgcatgggctatgaattgtggtctgacaggcatccgctcgccgccgcagtacatgaggctgcgcaacacgtgcgcgaccatcgtcagcccgtctccgaggccaaccctttcctgcaactgcaggcgcagttttccaccgccgtcgaacagatgctggatcaattccgtgattgccgcgaccagatctacgcacaggcgtttgacacgctgtacagcctgccgctggtgcaggccatgactggacagagcctgcacgacgatgcaccgccgcgaccccgtcccagcgagacgcccgagcatcgccagtatctggcgcaagagttgacacggctcgaagcggatattcacagcggcgggctcgccgaagccgtcatacgggcactgttcttcgtgctcgcggcgcgtggcgaggccgacgagcggcacttccggcacgcagagcaactggtgcgtccccgcctgggcagcgacttcgacatgcaggcctttcgccacctcgtgcgtcgtcaggctttgctcatgaggctcgacaaggacgccacggtgtccgccatccccgaattgctcaacggcatagcgcctgatgagatccgccaggtggcgggaatgatcgtgcaagtgattggcagcggcggtgtgctgtccgcacaagaacaaaccaggctggaacaggtttctaccttgttcgagcaggccgagcgccaagcgcaggcggcttcggagcccgccgtgataagtcccgccactgatacctccgctacggtcgtggacgcgaagtcgacaaccgccatgccacgctctgccagtggcacatccgctgcggtcgaggatgcgaatgcggcgccagccatgccgagctccgccagtgacacctccgctccggccataaacacgacctccaagacatcctctccaaagcctaaggcgcctcagaagaaaactgctacgcagaaaactgtgtccaagacgccagccgccccgcggacaagtcaaacacggcgagggaaaggcaaatga

SEQ ID NO: 535728 - DNA, 1101 bp, Stenotrophomonas maltophilia
atgagtgcaaccgagttgaccccgtcgcagcggtacgcggaaggggtcgcccgtggcgactggcagaacgacccggcccagcatgctgcgctggccgagctggaccgcatccacctgggcctgctggacagcgccgaggacggctggctggaccgcctgtcctcgttctggaagaagccggagccggtgaagggcctgtatttctggggtggcgtcggccgcggcaagaccttcctggtcgacctgttctacgacgggctgccgatcaagcagaagtaccgcacgcatttccatcgcttcatgcgcagcgtccacgagcgcctgcgcgagcaccaggggcagagcgacccgctggcgaagatcgcccaggagtggcgcagcaacctgcgcgtgctggtgctggacgagttcttcgtcaccgacatcggcgatgcgatgctgctggcgcggctgctggaacgcctgtttgccgaaggcgtgaccctggtcaccacttccaacacggcggtggagaacctgtacctcaacgggctgcagcgcgagagcttcctgccggcgatcggcctgctgcagcggttctgcgtcgagctgtacgccgaaggcaccgaggattaccggatgcgcgcgctgacccgctcgccggtgtaccgcgcgccgctggccgccgacagcgacgactggctggccacgcgctggaacgaactgagtggtggtcagccggccaagcccggcaacatcgagatcgagggccgcaagatcccggtccgtggccgcggcaagagcattgcctggttcgatttcgccgcgctgtgcgaaggtccgcgcggcccgtcggattacatcgagatcgcgcacgagttcaacacggtgctgctcggcggcattcccgcctttgaccgcctgaacgaagatgccgcgcgccgcttcgtcaacctgatcgatgagttgtacgaccgccacgtcaacctggtgtgcaccgcaagcacctcgccgatcgagctgtacaccggccagcgcctgcagggtgcgttcgagcgcaccgcctcgcgcctgatcgagatgcagagcgccgagtacctgggtaccccgcacccggcgtga

SEQ ID NO: 535729 - DNA, 672 bp, Stenotrophomonas maltophilia
atgcacaagcccttgttccccgttgcccccggcgaaaccgcctgcctcgaactggacggcccggccggcccgctggaagtggtcgtcgacctgcccaaggccgatgtgccggtgcagccgatcgtggccatcatctgccaccctttgtccaccgaaggcggcaccctgcacaacaaggtggtcaccatgaccgccaccaccctgcgcgagctgggcatcgccacggtgcgcttcaacttccgcagcgtcggtggttcggccggtgagttcgaccacggcgtgggcgagcaggatgacctgaaggccgtggctgcctgggtgcagagccagcgccccgacgaccgcctgtggctggccggtttcagtttcggttcgttcgtttcgctgaaggccgctgccgcgctgcagcccgaagcgctgatctcgatcgcgccgccggccggtcgctgggatttcgatggcatcgcaccgccggcgcgctggctggtgatccagggcgagcaggacgagatcgtcgacccgcaggccgtctaccagtggctggacacgctggacttcccgcatgagctggtgcgcatgcccgagaccagccacttcttccaccgcaagctgatcgacctgcgcggcgcgctgacccacggcgtgaaacattggctgggcgcagcggcatga

SEQ ID NO: 535730 - DNA, 858 bp, Stenotrophomonas maltophilia
atgctctacctgtctttggccgtgatctgcagcgtgctggtttcggtgttgttgaaggtggctggacgccgccagctggatgtcgcgcagatggtcacctggaactatctggtggccgcgacaatgacggcggtggtgctgcagccgccgctggacgcactgcgcgcgccgcatgccccgtggctgtcattgctggcgctggcggtggtgctgccctcgatcttcctggtgctgggccgtgcggtggcggtggccggcatcgtccgcagcgatgtggcgcagcggctgtcgctgctgctgtcattggccgccgcgttcctgttcttcggccagagcgccacgccgtggaagctggccggcctggcgctgggcctggtcgccatggttgcgatcagcctgcgcccgcgtgggccggccctggcggcctcacccggcggttgggggtggttgctgggcgtgtggggcgggttcgcggtggtggacgtgctgctcaagcaggtggcgctgtcgggcacaccgtcgatggcggcggtgctggccagcttcagcgtggccttcgtgctgatgctggcgctgcagttgtcgcggcatttcagcggccgcagccggctggcctggcgcaacctcggtgccggcgcgctgctgggcctgctcaatggcggcaacattctcttctatgtgcatgcgcaccaggcgatgccgcaaagcccggctaccgtgttcgccggcatgaacatcggcgtggtggtgctgggtgcgctggtgggcgtgttcgccttcggcgaggcgaccacgaagtggaaccgcgccggcctggcactggcggtgctggcgatcgggttgatcgcctgggggtga

SEQ ID NO: 535731 - DNA, 1260 bp, Stenotrophomonas maltophilia
gtgcacgttgatcggcacgcgagcgccagccactgcgccgggcaggccatcgtcgattccgtgcttgtagatgtgtccggccaccgaaaccaggtcagagaacatcgaattgccgaccgctgcggcgacctcggcgtcagacaacgcatccagacccacatagacgatggcccgctttcggatgacctgcatccagtcgaagatcgggcgcgggtcggccaggtcggagtagttcggcgccaggagctgggcgatcttgccgctcgtgagcttttccagcagcggcagcagcgatgcaacgatcttgtcgaagtaggtcttgtcgtagcgcaccgccgagcgcaggccatcgagcacagggtcgtagttgcgcgcctgggagaggtattgctccagcgccaccacacgcttctcgcgcccgatcatgttccttgggatgttcttctcgttgagcttggcctcgatctggacgatcacctcccaggccttgggctccgtcttggcaaagtagtgctgggcgtactcaatgaacagcgcgtcgatgttgatgacgtggcgctggatcagcatgtagtccgggcgctgccccagttccaccagggcgcgggcgatgatgttcacgaagcgccatgcgaactcgcggaacgccgcgctgttgccttcgccggagagctgccccgcgatgcgtgtcgccacttccgagatccgaccgaagcggcccacggcgttgtagcgggcgctgatttccggccagcccaagtggaagatgtagaactcgccttcgcggccagcgcgctgggcttcgacgtacatccgtttcaagagatcggcatcccccttggggtcgatgacgatgacgacctcatgctcgccggcagcattcctgcggcggatgtcctgcgtgacgaacaactcggccaggcgcgtcttgcccacccgcgtggtgcccagcaccagcgagtgcccgacgcgctcgcccagcggcaggctgacgtccacttcgtcgggctcgatgccgtgcagccttggcaggccgccgacaggcggcaacgggcgcacggggttgaaaggcgcgtcccagccggtgagcttcggcaggcgcgagagcggcaatggcgcgaattccagccgttcctccaggcgcctggtcagccggtaggccggcgtcggctcgacgtagcggcggaactcgggccggtacgtctgcatcagccgatgcgtgtgcttctgctcccagagaaagccgcgccccacgaatag

SEQ ID NO: 535732 - DNA, 249 bp, Stenotrophomonas maltophilia
atggtgcaccaccaccggcatttcgtccgtggccgcctggatcaggccgcggttcgcgtcgtcgaattgggccacggtttggcgggcggccgccagctcctgatccgcagtcgtgcgcatggtccgcagccgttcgatctccagctgatgctgttgcaggcggtcccgctcctgggccatcgcgccgcgctgggcattcacgtcgcgcgcctgcgcgtcgaagccttcgatgatctgtgcgatccgtaa

SEQ ID NO: 535733 - DNA, 438 bp, Stenotrophomonas maltophilia
atgcgggagaaacttgtagcgcttaatggccgcggcgcggcgcacgcccaactcctgctggatgcggtgcaggaactcctctgcgtgcgaggtgaggataacctgcttgccgtggagcaaaccgtcctcgaagaaggtacgccagatgccatcgcgatggtcgtcgtcgatcgcgttgacgacgtcatcgaatatgaccacggggcagccctgcgcgaggttcttggcaagcagaatcgccaggcccaggcatttgatgtgcccttcgctgaagacgatcaacgcgtcgtagcgcgcgcccggctcgccggcgaactccacctcgatcttgccgttctcggccacgggcaaccacagcgcgtgcagcagatcgccgggcggatcggcccggttgaatgcgttgtagagatggcgggcttggtctcccagcccctgtag

SEQ ID NO: 535734 - DNA, 1401 bp, Stenotrophomonas maltophilia
atggtcgaggcggccggtgtagccgttgtagacgtagctgtagggatgctcgaccttggccaccttgaacgcgtcctgccaccccaggtcatgcagggtgcggatcgggtcttccatcgcataggcgttgaaatcacccagcagcacggcgtcctttgcaccggtgccggttggatccgtctgcagccaggcgtgcagctgctgcgcggaggtcacgcgggtcgcattccagcagccctggttgtcattgtggtcggcgtctgcaccggcggcctcgcgacagcccttcgacttgaagtggttggccaccaccacgaacggcgcgccctgcttgccctggaaggcctgcgccagcggcacgcggctgtgctcgacgaacgggccaccggtcagcgtggccggctttccctgcggctgcaggcggttgctgcggtagatgatgccgacccggatcggattgtcgccggggccgttgccggcatcgacgaagcgccagtcaccctgcgcgccgcggtcccggttgagcgcatcgaccagttcggcgatggccgactgcgggccataaccatcgttctccagctccatcagcgccgcgacatcggcaccgagcgcgttgaccgtggtgaccagcttggccacctgtgccttgtgctcgtccagcgtgcgtgcaccgcgcagggtcgggaagccgccgccctggccatcgccgttgaagaagttttccaggttgaaggccgccacgtgcaggctgcccgccaccatcggcaccgccgggcgcttcagctccggcagcttcagcacaccttcgacctgcaagcgcgggtgcccctgcgcgtccacgtgcacgacaccttccacgttgcgcagctgcatgccggcgcgcagcaccgggttgcccggcaggtacggcacgctggccgggtcgcgggcatcactgccatcgtccagcaccaggcggcggcgcaggttgtcggccatcacctgctcgtagccggcagtacccggcgcggccacttcggtgggctgccagaggcggccatcgaaagcgacagtgagctggccgaagcgctccaggccatcggtgccggccagggtgagcggcgcggcgatgcgcacacgctggccgtccagcgcgcgccagtcagccggcgcggcggtcagcaccacggtcgcgctgctgcgcgcggcagcgggcgtcgtaaccggtgcggcctgcggctgggcctgggcgaaggcgctggccggcagcagcagggacagggcaagagcaagggaacggcggcgcatcgacgggcgattccagggaagagggcgcacagactaaccctgaaatgcgaaaccccgcttgcgggcgggggaatatgggcgatcaggcctcggtgggcaaagccggtgcggtga

SEQ ID NO: 535735 - DNA, 312 bp, Stenotrophomonas maltophilia
gtgcagcagatcgccgggcggatcggcccggttgaatgcgttgtagagctggcgcgcttgctctcccagcccttggagcagcacacctggaagtgcggcaaggtaggcctgaatctcgggcaaaaagccgtcgtaggcaaccttgacccgctgatggtgcgccaccaccgccacttccgcagcaacgacctcgatcagttcgcggttcgcctcgtcgaactgggcgacggtctggcgggcagtggccagatcctgatcggccgccccccgcaaggtgcgcagtcgttggacctccaactggtgctgctgtag

SEQ ID NO: 535736 - DNA, 474 bp, Stenotrophomonas maltophilia
atggcggtgctcgcctccgaccttgcgctgtcgcccgtcacgccggaaatcctcgcggcccgggagcttcgacgcggcaccatgcagttgctcgaagacatcgcgccgtaccggcacctgggcatcgaaccgccgccgctgcacctgctcatcaaccgcgtccacccggtgtcggcgaacgcccgactgatccagcaggccctgcgcgacctgttccaagaccatgccggcatccgcgtgctcgccaccgacgtgccagccatcgaagcctatccgcgcgccgcgacgcgcggcctgccggtgcatcgggtcgagcaccgccagccgcccggcagggtcgcgccggcctcgctcgacacgatgcgcgcgctcgcgagcgagctgttcccgcaatggcaggacagatttgccgcaatgtccggtcgcccgccacgtcctcttgatgccgggaggtcccatggcgaacgcacatga

SEQ ID NO: 535737 - DNA, 132 bp, Stenotrophomonas maltophilia; identical to SEQ ID NO: 356562

SEQ ID NO: 535738 - DNA, 234 bp, Stenotrophomonas maltophilia; identical to SEQ ID NO: 505119

SEQ ID NO: 535739 - DNA, 234 bp, Stenotrophomonas maltophilia
atgaacggcgcccaggtctcggcatttcaagccaacagcggtatcgcgccttccgcgatggcgaccgtcctggtcggcgtcgtgttcgcggtcctgctcgtgtggggcgtctgggccatccgaacggcctacgtggggtggtccgagagccgcctcaaccagcgccagttcctcggcgtctgcatccgcttcgtcgcgatgtacctcgtcctgagtttcttcctcctgtcctga

SEQ ID NO: 535740 - DNA, 270 bp, Stenotrophomonas maltophilia
atgaagatcgatccgtacatccgcaccaagggtgagcacgccggggaaccggccgccagcctggaatcgacgctggtccacatcggtctcatcaagatcgacggcacccaggtctatccgacgagccaggcgcaagccgaggcgccgccggccgaagacgcatccgcgtccgaagccgacgatgccatcgacacggccaccgagcccgccgagcgcgagcccgaggcgcaagtccaggagcaggagccggcattggctgcttcgttctga

SEQ ID NO: 535741 - DNA, 270 bp, Stenotrophomonas maltophilia
atgaagatcgatccgtacatccgcaccaagggcgagcacgccggggaaccggccgcaagcctggaatcgacgctggtccacatcggtctgatcaagatcgacggcacccaggtctatccgacgagccaggcgcaacccgaggcgccgccggccgaagacgcatccgcgtccgaagccgacgacgccatcgacacggccaccgagcccgccgagcgcgagcccgaggcgcaagtcgaggagcaggagccggcattggctgcttcgttctga

SEQ ID NO: 535742 - DNA, 327 bp, Stenotrophomonas maltophilia
ttggagcgctggctcaacgagggcgcgcacgcgctgcgcagcctgttctcgctggcccagcagtaccgctactcgggctgcacccgcgacgatttcgcggcgaagaatgccgcagcgcgggtcgcgctggagaagttcggcgagttgccgcaggacgtcctcgaaggcacgcgccgctcgacgtttgcgccacccatggtgcgccgtggtctgcaacagcgcggtgagaatcctgccgcagccgctaccagcgtcgatggtgatgcggccgctgctgccgacccgtccgaaggcgcagccactgccggcgaggacgaatccgcatga

SEQ ID NO: 535743 - DNA, 234 bp, Stenotrophomonas maltophilia
atgcgggagaaacttgtagcgcttgatggcgccagcgcgccgggcgcccagctcctgctggatgcgatgcaggaattcctcggcgtgcgaggtgaggatgacctgcttaccgtcgagcaggccatcctcgaagaaggtgcgccagatgccgtcgcggtggtcatcgtcgatcgcattgacgacgtcatcaaagatgacgacgggacaaccctgcgcgatatttttggcgagtag

SEQ ID NO: 535744 - DNA, 264 bp, Stenotrophomonas maltophilia
gtgaaggccgctctgcgcgatgcgtcgttctacgcctgcccaagtggtcacgggcacaagccgcgcccgcccaagtggcacgccatcgtggaccggcccggcaacaagtggggggcagaccgtggtcccgcttgcggtatcccgttccacactgaggagaccgaggttgctgccgagacgatcactggccgccagcgttgcggcaaaccagcctgcaaggctgcatttgctgcgttcgacagccaggcggtgggcaatggctga

SEQ ID NO: 535745 - DNA, 642 bp, Stenotrophomonas maltophilia
atggcgaccattttttttctccgatcgttcaagttagaaacggaatggcttgcgcgagagtacgaaagagctgcagcctctcgcgtcgatcgagcctctcgcgtcggtcgagcccctggcgtcgatcgagagtctcagttggcgtgtgagatggccatcgttcggctgcatgattcttgggcgcgatgctgcagagatattgtcctccgctctgcctgtggatgcaggacactcggtggggcgagggtgcaggcagcagcgggcgtgaccaatgaggccgaagcactggcaaagtacttcgcgactcttactattcgacgtggccgtacgccacaggagcctaaatggcactcagcgagggatgccattgacgctgctcaaagaatcggtatcacgaaccgcgtagcagttgtggccgctctttcatcgtccaactcgccagcagaggcaatgagaaaagtccgtaactactacgcgcaccggaccggggacactgtggtcaaagcgatgtctaccggcatttttcccgccctctccgttccttccgtgttcaaccttaacgagctcggcgccggaggcgaaacaatcttgaggggttggatacgcgagcttcgtctgatggcagatgccgccatgttgtaa

SEQ ID NO: 535746 - DNA, 762 bp, Stenotrophomonas maltophilia
atggccgtgcgcggtctgccggctgatgccgagccggcggccgatctcggccagtgccatctgctccacccgggccagcaggaatacctggcgcgagcgcggtggcagcgcggcgatgatcgcgtcgagatggcgcagctgttcggcgtccagcaggtgctgctccggcagcggtgcaggatcggcgagggcgtgcagttgggcgtcatccagcgcttcctcacgacggcgctggcgttgccggtagtgatcggcgatcagattgtgggcgacgcggtacaggtaggcgcggccgttgcgcagcaggccgctggcggcgaccttgatgacacgcagccaggtttcctggacgacgtcatcggcgtcgctgcgttgcgggagtttacggcggacatgggcgtgaagcggccggtaatgggccgcgcacagctgcgcgacatccgtcggttcgacaggcgtggacacggggcgggcgacaactgggaaagggaacagcccgcggcggcaagggcagcggctgtaccttacagcaaaagagaatcatttgcatctatcgatgggcgtgacacgcctgcccgggacgggagatcagcgcgggcgataatcgcagtggatctgcagggcttcggtggggttgtgatgcagcttgaagccgcagcgctgcaggctgcgcttcacccgcgcgaccgcttcggcatggcgggcgacgcgacgatcctgccagcgtggcggggtgaatacgcccacgggcagcagccgtag

SEQ ID NO: 535747 - DNA, 621 bp, Stenotrophomonas maltophilia
atgtaccgccccctcccaggggcacgcacgggcgtggcccgcattccaaaccgaacagcacggctgctggagcacgccgcgacttacacttgcttttcaagcctgccaggacaaacacgcggcaaagaaggcagcccctggaccctggatccccgtccgactggtagcgctaccatcgcgttgcagcggagagtaatcacccgggttcgcgcttgtcaccatgcagcgcagcaaatcggcagcgcgcgtagcggcgctggaatcaccccgctactgatgaccgggctgccgctgcatccggtcaccgctcacccgccgcaggaaagatgcccgcgcctgcgggtcatccagaaaggaacgcaccgtgaacgctctccagcgcatcgccgccgcagtcggctcgccgtactcgttccgtccggctccgccgtttccgcggccaacgccgtgatcgtggacggagcagatgagccgctcaccgtggtgctacgcaggggctaccactccggtcccagcagcttcatcacttcgacctccagtttctgcgcggcctcgtcctgggaggcgaccttgatgcacagccccgactgcgccggccgggcatcagctggtatcggttga

SEQ ID NO: 535748 - DNA, 648 bp, Stenotrophomonas maltophilia
atgaatgaccaaacggatttctcgtcactgatccgcatcacctcgatggacgcgttgaaagcagcgaccgaggcgcgctccaaagccgactctgctagctatcgaatggcggttcgacagatttttgcgggggccgagggcatcctctggtacgcaaaatgcatggcgcgagcagccgcaaagatgcagccagagacctactcagcattggagatcgccgctctcaacgatgaaacctatgcagttgcagaaaacggcaccgtaaggactaagccgaacttcataccgatggtccacagtatgaaattggttgccgacctgatgtcccgcaagcaagtgtcgaatgccgacttcacgttcgaccaaaagatgctggccaccattaagcaggcagtagcggtccgcaatcgactcacgcacccgaaatcgggcaacgatcttctagtaacggaggaagagtttaatgtcgtggtcgcctcgtgggggctgatgcttgccttcacactgaacacggcgcttgaagctgacaagcgcctcggcaccggcatctttccagtagttaagaccactaaggtttcgctgctggacgcactcgtcggtgcaacccagcacgacatggacgcgggagacacgccgccaggcacatag

SEQ ID NO: 535749 - DNA, 909 bp, Stenotrophomonas maltophilia
atgaagggcatcgggttcaagacgatgcgggagcttggggggccgctcggtgttgcagctcgtgagttggacggcacgctccttccagctctatcggcgaccactggtatggaaccccgcatcctcaagcgcactgcaatgatggccggtgtgacgatgcgaaggcgtctgagagagtcaggggtcgaagtaatcagccaggccgacgagcgctatccgatcgcgttccggcggctcaaccccgagctacagccgttatggcttttttgcagaggcgatctttcccttctgcagcgaccttctatagccgtggttggcacccgcgatccttcgtctgaaggggcgttcttgacccagtacgcagcgaggacactccaagagttggaagtcccactagttagtggactcgcccttggtgtcgatgcaatcgcacatgagtcggcattgtcatcaggcgtcccaaacatctccgttcttgggaccggaattcttcgcccctatcctgcgcgcaatgcctggatggcagacgcaatcgtcgacgcaggaggccttcttctatccgagtatttcccagaagcggaaccaaatggagagcagttcgtttggaggaatagacttcaagctgcgctctctgcctgcgttgttgcgccccagtggaagaagtcatccggcaccgcacataccatgcgattcgcaaagtcgttcggtaagccgacaatcaatttggtcccaaatggtatgcggatgtcaggggaccacggtgtatccgaacacctcttcaccgtgcccaagcagcactccgacttcctcagtctcatgaggtcgtccctcaatcactggcctgaagcttttaggaccgaaccagtcaatcccgaacccttggccgaacaacactcattattcggatga

SEQ ID NO: 535750 - DNA, 1227 bp, Stenotrophomonas maltophilia
atggcattgaagctaattctggtctccgtcaaggggacaatcgtcaacccaaacaacgtggttgaacaccaagtcgcaaaagacctagggaagctcgcagcggacctccacggcaaaggggtaaagatcgccctatggtccaatcagtcctggacgtgcgacaacattccactgcatgagtacatccagcaattcgcgggcgtgccaatccacgcacatggcgtccaatgggatgggtcccccgcaagaaagcgaaaggattccgctgcttctatcctgaccaagcatggtgtgcaaaaacacgaagccatacttctcggtggcggtgacgacgacatgatctgcggtgtaaacaaccgtctacttcacatccgcagcgactggtatgggaaacgaacagatcacggcttccaagtgaagtccgtcgaagaactgcgccgattctgcactgtttttggcctcaggcagtacaacgtattctggcaaactggtggagcaaactggacggtatctaccgcaggccccttctcaaccatggtgagcgcgtacgcgctgttcggctatgacgcgagagatgcggcaaagcatggagccggccatcccgaattctggttctacatcacagtggcatcgctttacttctctggactgatggaagacgtggatcatatctgcagctaccctagccacagcgaccagccaaagcctattaccgccaacggcctcgagagcattctggcgagactaggaaagtgtacgcgggcctcctacttgcacgacctaatcattcggcattcgaccgcagcgaagagtcaacctatcaaggcagccgacaggcttttcagcaaccagctgagcaccatcaaactgaacaagttcccccacagcaacctcgccgcggaagcgcgcaagacgcccatctcgctaaaagggaagaaggttctggttgttgacgacatgatcacctcgggccgcagcattgaaagtgcacgtgcatacattgaagctgcaggtggacacgctacgctctttggctggcttaaaaccatcagtgccccatacatggctctcgatggggctattcctggcctaaagccatatgagaacaacaacgttgtagttgagccaccttcaacggcgcactcgtatcaagccggaattgtcgcgcccaatgctgcagcagagctggacgccatgctaaagcagttcgccgcgtggaaggtctaa

SEQ ID NO: 535751 - DNA, 555 bp, Stenotrophomonas maltophilia
atgggaattgaacaagaactcgaggtcgcgacctcaagcaccaagcagctgattagtcagatcgaacaagcctatggcagcgctatcgatatttcggatgccaatggggcggttaatcgagcgcgcagcgtgctagataacaacgaggagccggccatgcagcacgcttgggttgaggtgacggtcgcatatgcatcgctgtctgcccaggtgcatgcgcattgcaagggaatgagcgtaatgcagggggtcggtcgggacatcattgacaaaagaatggatgcctcgattgcgtcgatgcggaccgcgcttcggcaaatcgttgcgaacccgcaggtgctgggcgcattgcctgaatatggcattgaggcagacgcagtgactgcgctcgcgggaacggcggtcgaagtcgctgcgaatgatgtggacagtgctgcagcatggatctacagatgctgggaccaccttctcgcggccgccaaagataaagctaacgccaaggcgagcgcgagcgccaagaactccagtggtggcagccaaaagcacaaactctga

SEQ ID NO: 535752 - DNA, 273 bp, Stenotrophomonas maltophilia
atgacgcagcagcagaagattccgccccgtccaattcccgcgtgcccctcgggccatcccgcccgctacatcctcgactgccgacggctggaagcacgtggcggtcatttcattgaatgccgctgcagtacgaccacgaaacacccttcgttcgatctagcgtgggcgcactggcacaagcaccatgggctgcagccagtggtgtcatccgcacctgccggcggcagcaatgtggtgcagctggggcttcggttggcaggtggtgacgtatga

SEQ ID NO: 535753 - DNA, 240 bp, Stenotrophomonas maltophilia
atgcacattaaccttaacttcaaccttcagttcggcggcaccaacaacaccaaccacgtcaacgttgcggatagccccaatacagttgtgacccttcctagccccacccaagccccgcagcgacaagcagcgtcgaccaattgggtgatggtggcgctcaaagccttcgccgccctcgctgccgtggcgaaggcggcatacgtgcttgctccatacgtgggaccgttgttgggcggctaa

SEQ ID NO: 535754 - DNA, 1047 bp, Stenotrophomonas maltophilia
gtgccggccgctggccggcaatcccggtgtcccgcggttgccggcgtaatccagcgccgagcacaccgctgccacctgggcgtcgttgcactgctgcggggtggcgcgcgggctgtccgggtagacctcggtggtggtggtgtacttcgcaccggtgatgccagcgcacaggcccagcttcaccagcgggtattcgatcacgccgtgggccaccaccggcgaaccgatgatctcgcccttgtcgtcggccggggcgatatgggtcaccttttccaccgcggcgatcaccgcctgctggaacgccgcctgcgggttctcgctgtcatccaccagatagaagccatcgggaatcaggcccggctcgaacggcttgccgtcacgtgcggccagcgccgggcggaactcgctctcgtcgctgtcggtggtttcgtgcaggtcgatatgcagcacgaactggcctttgtaaggcgcgatcagctcgatgacagcggtcgattcgcgggccgggccatcggcgcggaaattgcggttcggatcgatcgcatcgaagttccagcggttgatgcgctcgaagccccacgggttcacgcacggcgccaccagcaggttggccttgcctgcatagtcggtgccatgcttctcaaggaactccagcgcgcccatcacgccgctggtttcatacccatgcacgccacctgtaaccagcgcggccggcaacgccgggttccagtcgcggctgcgcagggcgaacagggtgtaggtctcgccagcgtagtcgagctggccataggccaccttctcgaagcgggaggccagcgcctcgatgcgcggcagcacctcctcgtcgtagcggcgcaggcgctgctggcggccacgccacgcctcccgttccgccgctccccacggctggccagggattccgacggggtagaaggcggcttgggacatggcggatctcagcgagtcaggaagcaatcgcccactctaccaccgggggaacagcgtgaaccggcggcgcattccattggcgaatggaatcagcaataa

SEQ ID NO: 535755 - DNA, 627 bp, Stenotrophomonas maltophilia
atggggcggatcctggtgttggccggcgtcaacggcgccggcaagagttcgctgcttggtacctggctggaagccgaagggctgagctggttcaatcctgattccttcacccgtcgcctggtggaggccggctggccgctgcccgatgccaatgccgaggcgtggcaggaaggcacccgccgcctgcgccaggccatggccgatggcaccgacttcgccttcgagaccacactgggcggcaacaccattccgcgcctgctgcgcgaggcctgcgcccagcaccaggtggcgatctggttctgcgggctgtcgtcggtggagctgcacattgcccgcgttgcagcgcgggtggcggcgggcgggcatgacattccggcggagaagatccatgcccgcttcgactcggcgcgcgagaacctgctagacctgctgccgcacctggccgaactgcatgtctacgacaacagcgccccggccgatgccgagggctgtgccgaaccgctgccggtactggcgatggccaatggccagctgcagtacccggtctcggtggccgaactgctgcacaccccggactgggccaagcctatcgtgatgcgcgcgatggagttgaacacctcccggtag

SEQ ID NO: 535756 - DNA, 294 bp, Stenotrophomonas maltophilia
atggccagctgggtgctgaccggcgagtcgcgcccgtacaacgccggtgccgtggccaacatcaagccggcgcacgactacggtgcggtggagctggtggcccgctacagccgcctggacctggacgacggcagcatcctcggtggccgccagcacgacctgaccctgggcgcgaactggtacctgaccagccacttcaaattccaggccaattacgtgaaggtcgacgccagccgtcgtggtgtgcacagcacgccggagatcttcgaactgcgcgcgcagatgcacttctga

SEQ ID NO: 535757 - DNA, 789 bp, Stenotrophomonas maltophilia
atgccggcatcgcgattgcgtgcatttctggaactgtcgatcgacggcgccgaacgggcagcttccatcatgcggcgccattcctgcgcttggcaggcggtgagcgacagccacgccaggtcttcaggcagcagctcgcgaccttcgggagtgatcaggcgatcaccgaggaaagaaaaaccggcccaagggccggtcaggtcaatacggtggtgcgggtcgaactcaatcatgccgcgatctcatccttggccggggactgaggacgcaggcaagagccgagccagaggcccagccattgccatgcagagccaacaaaggcccagatttgacgaatacgccatttcgcataatgtatattatgttcaaggcgatccgggggtggctggcacgcatcttgcctcgaccctcggccctgctgtggcatggagcctgattgtgcgtgatcgcaacctaaccggcccttgggccggtttttcgtttaaggctggccgactggtcacccccgaaggccgcgagctggagccgcaggatctcgcgtggctgtctctcactgctgcacaggcacaggaatggcgacggctgatggaagactctgcgccacgaaaagacctggtgcaacgtcgccggaaacccttggcctacaagggttctgaaatcgtggatctccgggaagtcgtccgccgacggacagaaaagcggtcatcgctggcgatggctggccccgacgccgagccaccagcggcagtcctgccggtaccggggccgaaacgccgccagcgcgtgtga

SEQ ID NO: 535758 - DNA, 1194 bp, Stenotrophomonas maltophilia
gtgcgcctaaacggggtaggggagagcctcgacaagatctccgcgcacctgggcatgcctgaagaagaggtgcgcgagctggtgcacgtgatgggcgataaggaagtggttgattggtgcgtatgtgacaccgacaacgatggcgccatttcgtttccgcatatcgagaagcacgcactgatcgtgatcgatgaggcacacgaatactggccgaccaaccgcgccaacctgcccgagcgcactgcaaacttctttgccaagcacggccatatcagcttggacatggtgatcatttcgcaggactgcaaagacctgcaccgcctgatcatccgccgcatggcaaagaagaacacgtataccaagctcgacgcgctggggtccgatcagcggtactcggtgcggttctatgcggccactggcaccggcaaatacgaaacggtgggcacagaggtccgcaagtacgatccggccatctgggagctctaccacggcgtacagccgggcattgagtcgaatgaggtctacaagggaaacacgcgcactttgtggaagaccctgcgcggcccatcaatcgtaatgggtctcgcacttgtcattggcgtggtgatgttcctgcggttcttcttcgcagacggctcaacgggcgaggaaagcaagctcaaggaggttgtcaagtcgcagaaggccgcaattcccgcgatagcgcacgcgccgggtgctcagccggccacggtagtcacaaaggttgtcgagacgcccaagacgaaggagaggcttcctgcgggcgttcagtacattctggacatggcggccagtgccagggcgaggcacgccgggtggtacggccagcgcgacatcgtggagtttcgcgcgtcaggcggcgggcaagtactcgatcgtttcacgactgagcagctgtgggcgctgggctggtctgtgaagcgaaccgagtttggcgtgctgctgagcgctaaggggcacgagatcattgccacgacttggcccgtagacccgtttggcgagcagtccgatgctacgaccgcgcgcataaaggctgcggcggggtcgcctgtgacgagcgcgagcgagacacagccgaccaccgccgcggcgaacgggagcaccctaattgcagttgggaagcgccctttgggcacgttcccagagacgccaccttatccggccagcttctga

SEQ ID NO: 535759 - DNA, 669 bp, Stenotrophomonas maltophilia
atgtggaaagcccgttttttgcaggcattgcctgacatcgaaaagcaggcccccgctgcgcgctggatcttcctgacgctgacgcggcggaacgtaccggtcgaggggcttcgcaacgaactcacggacatggggcaggcgtggaaccgcctgcgcctgcgccgcgaatttcgcgacgtgctgggctgggtgcgaacggtcgaaatcacgcgagggaaagacggcaacgcgcatccgcactaccacgtgctgatgttagtgaaatcgacctacttcaagcccggccacttcgtgccgacggccgagtggtcgcgcgtctggcgcgaggtcgggcggctggattacgatcccatctgcgacgcgcgagcggtgcggactcggggagagaacagcatccgggacgcggtcgcggagacgctgaaatattcggtcaaggcttcggacatgaaggccgatcctgcgtggttcttggaactgacgcggcagactttccgaacgcgggccatcgccagcggcgggctgctaaaagacgttttccgcgacgaagccggacaggaggatttgctaaaacctgacggtggagaggaagaagcggcgacggatgaagcgccggaactccgcttcacatggtcgaacgaaaagcgcgactaccgccgccggagggcttga

SEQ ID NO: 535760 - DNA, 879 bp, Stenotrophomonas maltophilia
gtggcgacggcgatccacctgtccgtttcgaccgtgagccggtcgaagggtcgcagcagcgtagcggctgcggcctaccggctcggcgttagcctggtcgatgaccgcaccggcctgacgcacgactacacccggaagggtggcgtcgtggcggcggcgacggtgctgccgaagggagcgcccgccgcctatgccgacccggcgacgctgtggaacgcagcggaggcggcagacaagcgcgtcaacagcgtgacggcgcgagagtggcagattgcggttccgttcggcttgtctgaagcggacgcgctgaaagcgggccgcgcctatgcgtcgtggctggctgaccgctacggcgtggcggtgtcggtcgcggtccatcgcgacaacgaccgggacgcgagtggcaagccgaagcctgaagcaaagcgcgggtttcacctccacctgctcggcacgacccggcaggtcgggccggatggtttcggacccaagacgcgggttctggacgacaagaaaaccgggcctgcagaagtcgaagcctgccgggccttctgggcggcaatcgcgaacgaattggcccagggccgggactacgaccaccgcagccacaagcggcagggcttgccctcccctcccccggcctttggggccggggccactgcccgcgcccggcgcgggcagtcctctgggcgcgtgcgcgcggcagcagcggcccgcagccgccgggggcggctggagtgggccaaggacgcgctgagcggcctgctcgacgcgtgggaggtcctacgccctttaggagccgccctagacgctcgcagggcggctagggcgcagggaggcccgccagcgccctctccgggccgtaggccgcgtttctga

SEQ ID NO: 535761 - DNA, 843 bp, Stenotrophomonas maltophilia
atgccagtactcacattgtacccgcatggcgggaagggcggtgttgcgcccatgaaaaacagccatacccgcgccctcaggggtgacgttcagggctggtctcacggcgcgacacgccgtaacaccgagttcctcatgtcggtccgtgaagaccgacttaccggggcaggggttgctctcacccttactcttcgggattgcccgcctacctctgacgattggcacaagctccgccgagcttgggaactccgtatgcgtcgctcaggcatggtccgtctccactgggtcacggaatggcagcgccggggcgtgccccacctccattgcgcgctctggtttgaggaccggtacgacattgcctctgcggtagaccactgggtggcagtggcaggcgcctacggcgcgggccaccgtggtcagcatggccgcatcatcgatggtgctgtgggttggtttcagtacctcagcaaacatgctgcccgtggtgtttctcactaccagcggtcaatcgataacgtccctgaggcatggcagaccaagacaggtcgcgtatggggcaaatgcggcgaatggcctgtccaggagaagctgaagatccatctccaagaccaattcggtgacggtggctggttcgcctatcgtcggctcgttcgctcttggcgaagggctgacgcccggtcatcaggggatgcgtaccgcatccggtcagcgcggaggatgctgcagctctccgatccggtccgcgcccgcctgatcgggttcatggagtggatcccttacgaaatccaaagcgcccttttggccaacctggctatgcgtggctatcagatccacagcatctga

SEQ ID NO: 535762 - DNA, 438 bp, Stenotrophomonas maltophilia; identical to SEQ ID NO: 497253

SEQ ID NO: 535763 - DNA, 207 bp, Stenotrophomonas maltophilia
gtgatgcgccacaagactcaatttgacggctggtcctcggcaatggagccgagctttgtcacctctccggcgcgtgtcgagtacgtgtcatatgcgcagaagcagcgcgacgccaccgagcttcgcgccatggtgacagccaacatcgcacgtggcggcgactacgtggtactgccgtcgcacgctgctgcacaggtgtccgcatga

SEQ ID NO: 535764 - DNA, 309 bp, Stenotrophomonas maltophilia
atggcgcccccttccaacgtcgtcattcctgagccgtctctgcggccagtcatcgtgctggaaacgcagatccccggtttcggcctgcgcgcatccttcgaccagcggggaatgctgttccttgccctgatacacatcgaatcggacaccgccgcgaccgtctcggctcactactcgcggaatgtgcagcgcgccgccaccgagggcatccagacgggaaacgtggtctacctgctcgccaagggcgaggccagccggttcttcgagtggctgcgtaccggcgccagctatccgggcggggtgaactga

SEQ ID NO: 535765 - DNA, 573 bp, Stenotrophomonas maltophilia
atgtacatccagtacaaccataccggcgtgcggcacagtgcgatggcgacgtatctgagcatctattcgggtcatgagcccggctatagcgtcaggcccaaactggatcttgacgcagaaagaaggttccagaagcaggacgtgacccggcgagtggatctcggcttcgaccttactaagatgagcgcagccgatcggatcgctgggaactcattgacccaggtcgctgagatcggtggagattacgcggccgaccgcctttacatcacgctgaccatctccgcgaaggatcctcgtaaaaggctgagctcaattaagaacgatgttcttggcattctgcccttagctggcctcttcaaagctacggtttatggcggggacgaacctgaggtgacagtcacacagtccaagaacggaaagcaaaaggaaaaggttgctaaagctgactttgagccaatcgatttgcttgaggagctaatcgagaaggaagtgtccatcgcacttgacgcaacctatcgaatgcctttggcgtcgcgctacgatgcgctcaaattcgccgcacgcaccatctag

SEQ ID NO: 535766 - DNA, 450 bp, Stenotrophomonas maltophilia
gtgctaactgatcttcaccgcgaacgtgcctacccctacgccggcggcttgctcgctggcgtggcggtcttcgctctggctaaggccggctatagcgttagctacagcgagaacatgctggcgtcgctcgtctcgctgggaggcatttttgctggctttctagcgacggtaaagaccctcctcctgacgatgaattcggagacactccggagccttcggacttccgggtacatgggcgacttgctcacatatctgaaggaagggatctatgggtccctcattctctgtgttcttgcaatgctcggcttcaacgaagccatgcggtggcctagcttccatgcggccacgctgtactcagcgctattcttctccctgctagcgctctatcgcatatctcgcatctcaattgcgttgctcctcgaccaaacagacggtccagataacgactga

SEQ ID NO: 535767 - DNA, 297 bp, Stenotrophomonas maltophilia
atgggaactgtcggtaaccgtttgatgcttttgggagccctactcctgggcggcgtaatcgcctatttcgcggtagatcaacccagcgcggctaagcttgagacagacaatttcattcgcgagatcaacaacaggcaggtgtcagccggccttaaagacggactgattgatctgattagtgctgaagaacgacttggggcaaggcgtcgccttgctctttggcctgcgggcatgggcttcttgctgctgggtataggctgggccgttggtgcgtcgaacaagaaggcggacgactga

SEQ ID NO: 535768 - DNA, 249 bp, Stenotrophomonas maltophilia
atggcgatcgacgcgaaatcggtgcaaaaagtgtttggcgacgttcttcgccagacccgcaccggcgtcggattgtcgcagcaggaactagcattgcgggcagagctagaccgcacctatatttcgcttctagagcgtgggaagcgccagccgagtttggtcacgctgctagcgcttgcggatgcgatggccatagacgctgccgagttggtgcagagcactggcgcgcgcttgcaagaagccagctag

SEQ ID NO: 535769 - DNA, 852 bp, Stenotrophomonas maltophilia
atggcgaacgttgacgtggaagtgcgcgagagcgctcaggtgattgctttgatggactgcccttcctttctttcgaagtatcaatttttgcaaaagaacgtcgcctcaagaagcacgcgggagctgtatgaaatctatccacgcgagaagggatcgttcctgagcagcaagtacaacaggcgtggcatcaacttcgacaagatcgggctgggcgattttcgccacttcctacttcatatgggtccgaaaccaaatcccactgactccctcgatcgcatcgacaacgccaaaggttatgtgatcggcaatttgcgctgggcaagcaagttggagcagtcgcagaatcggcgcataactaggtggatcgaatggaatggttctcgctacagcagaagacagttcgcacgcttgatctcaattccccatgcgaggcttcgtcagcaaatccataggggttggtctctcgcgaagatcgttgagggcgcggctgtgagccagaacccgctacgcgactggcggttcgacacgagcaacggctccgagctcgaacgcctgtatcgcaaggcgggagcatttggacagccaaggatcgacttcctgcttgactatcttcggagacagctcaagggggagaagcggttggatgcagcatcgcgcctcaggcatctccacctcaggtacgagcgcaaacggcaagagctagtggtggcgacggaaggactggaaatggccaaaacagatgcccttcttgcggctatggacgtcgatccgagtcaggcgaaagaggaccaccagcagaacatcgtgcaatcaattgcaaaccccaagaaggtcttcgtctacatcgactag

SEQ ID NO: 535770 - DNA, 1281 bp, Stenotrophomonas maltophilia
atgaaacgcgcccttaccgccaccgtagtctccaaggcgaaggccagcgaaaaggcttacaagctagctgacggcggagggctctacctttttatcagccccactggaagtaaaagctggcgctataagtatcggatgcatggcaaagagcgctgccacaccatcggcacgtaccccgaactgtcgctcgcggacgcccgcaaggggcatgagactgcaagatcgctagtgaaggcttcggtcgatcccggcgaacgccgcagggctgtagctcagcaagagaaggctgcttctgcgaacacctttgaggctgtatgtctggactggatcctgaagcggaccaacaagggggaggcgggaaagcgctggacacctgactatgcgaaaaaggttgaacgaatgctcgcccgtgacgtatttccaaaggttggcgcattgagaattggagacgttggggcagcggaacttgccccgatacttgagaacgttgcggaacgtacgaaagtctcaatgcctcaccataagaaggtaagagtccggacgcgtggcgcggcgaccaccgctattcacatcaggcagatttgcagagccgtctttcgccacgcctccgctaggggactcgcgagatttgactttgaccctacctgggggctgcgggacgttgttgctaagcccgccgttaggcacaacggcttccttcacttggatgacgttccggccttctggtccgatttgaatggtgtatcggcgactactagcgtgaagattgctattaagctccttgcccttacctttgttcgaacggcggagttgcgacatgccgagtggcaagagttcaccctgacaggtagcaagcttggtcctcactggcggataccggcgcataagatgaagggtcgccgcgaacatcttgttcctcttagcgtcggtgccattgagctactctccgcgctcaaggaagttagcggctcctccccgttccttttccccagccgaaatcgagttggcgctgtcatgaatgccaacacagtgaaccaaacgctgtatcgcatgggctatgccggtaagttgagtgggcacggctttcgtgcaaccgcgtcaacggcattgcacgagttggggtatcccccgcacgtaatcgaggcgcaactggctcatatcaatgggagcaacaaaactgccgcttcatacaatcatgcaacctattggacggaacgctcagaaatgatggcccgctggaactccttactccagcctcggacagagacgtctccggagtaa

SEQ ID NO: 535771 - DNA, 297 bp, Stenotrophomonas maltophilia
atgccggaaatgctcgcgcaccttgactttgacggcgccaaggatgttggccacatcctggttaagatcggacaggacaagggctccttccttgtccaagtcgcggaagtggtccgacttcacgtacaccgtgaagttgtatccaggcgccttgatctgggggccgatcgtgacctcatggagggaaacacccgccttgtcgcaaagctcgaacactcgatctgtctggaccgaccattcgacgatcgtgatagacactggaacccgctttccgctttggagttcgacttcgcctag

SEQ ID NO: 535772 - DNA, 702 bp, Stenotrophomonas maltophilia
atgctgcagatccgcaagagcgctacccgtggcctggccgagcatggctggctgtcctcgcgccataccttctccttcgccaactactacgacccgcgctacgtcagcttcggcccgctgcgggtgatcaacgaagacaaggtgatcggcggccagggcttcggcacccacggccacagcaacatggaaatcatctcctacgtgctgggcggtgcgctggaacacaaggactcgatgggcaccggctcagtgctgcgctacggcgacgtgcagcgcatgagcgccggcagcggcgtcacccacagcgagttcaaccactcggccgacgagaccgtgcacttcctgcagatctggatcttcccggacaccgagaacatcacgccgtcctacgaggagacccacttcgcgccggagaccaagcgcggccagctgcgcctgatcgcttcgccggacggtgccgacggttcgctgcgcatccaccaggatgcccgcatcttcgccaccatcctcgacggcggccagaagctgcaccatgcccttggcaacggtcgtggcgcctatgtgcaggtggcccgtgggcagctgcaggtcaacggcatcaccctggaagccggtgatgcgctgcaggtcagcgacgaagcccagctgacgctggaaaacggcaacgatgccgaagtgctggtgttcgacctgccgctgtaa

SEQ ID NO: 535773 - DNA, 558 bp, Stenotrophomonas maltophilia; identical to SEQ ID NO: 503995

SEQ ID NO: 535774 - DNA, 843 bp, Stenotrophomonas maltophilia
atgccagtaatcacattgtacccgcatggcgggaagggcggtgttgcgcccatgaaaaacagccacgcccgcgctctccgaggcgatgttcagggttggtctcacggggccacccgccgcaataccgagttcctcatgtcggtccgtgaagatcgacttaccggcgccggagttgctctcacccttaccctccgtgattgcccccctacctctgacgattggcacaagctccggcgtgcttgggagcttcgtatgcggcgctcaggcatggtccgccttcattgggtcacggaatggcagcgccggggcgtgcctcatctccattgcgccctgtggttcgaggacaggtacgacattgcctctgcgatagaccactgggtggcagtggcgggcgcctacggcgcgggccaccgtggtcagcatggccggatcattgatggtgctgtgggctggtttcagtacctcagcaaacatgccgctcgtggcgtttctcactaccagagatcgatcgacaacgttcccgaggcatggcagaccaagacagggcgtgtttggggtaaatgcggcgattggcctgtccaggagaagttgaagattcacctgcaggaccagtttggtgacggcggttggtttgcttatcggcgcctcgttcggtcctggcgaagggctgacgcccggtcatcaggggatgcgtaccgcatccggtcagcgcggaaaatgcttcaagtcgccgatccagtccgcgcccgcctgatcggattcatggagtggataccgtacgaaatccaaggcgcccttctggccaatctggccatgcgtggatatcagatccacagcatctga

SEQ ID NO: 535775 - DNA, 840 bp, Stenotrophomonas maltophilia
atgcccgtactgacagtctacccgcacggcgggaaaggtggcgtcgcgcccatgcgaaacagccacgcaagaaccccccgaggggacgttgaaggatggtccgaaggggccacccgacgaaacaccgaattcctcatgtcggtcaggaccgaccggctcaccggagctggggttgccctgaccctgacccttcgggattgccccgctactgccgacgactggcaccgtatccggaaggcatggacgatgcggatgcagcgtgccggtatgctccggctgcactgggtgaccgagtggcaacgccgaggcgtcccgcacctgcactgcgcgatctggtttcctgacgcttacgacacgattacccctacccgcgcctgggtggaggtggcgagcgcctacggcgccggcctccgggggcagcatgcccgcatcattgatggccctgtgggctggttccagtacctcgcgaaacatgcagctcgcggggtgaagcactaccagcgcactgcggagagcatccccgaaggctggaagaaaaagaccggtcgggtctgggggaagtggggagactggcctgtccaggagaaggtccgtctcaacctggaagaccagcacggcgatggcggctggttcgcctaccgtcgtctcgttcggagctggcggttggcagacgcgaggtcagcaggtgatgcgtaccgcatcaggtctgcgcggaccatgctgcgctgcccggataagtcccgcgcccgcctgatcggctacagcgaatggatgccctacgaggtccagatggccctcatcggcaacgtcgccagccggggctaccaggtcacttcgtga

SEQ ID NO: 535776 - DNA, 876 bp, Stenotrophomonas maltophilia
atgaaggggcgctggccgatcacgctgatgtgcgaggtcctgcaggtcagcaccagcgggtattttcactggaggagctgtgcaggccgtccaggcccaagcgggggcgggggtgcgccgcacagtgatgaagccttgatggtgcacatccgggcgatccacgagcagttgcgcggcgagtatggctggccacgcatgcaccgggaattgctggcccgagggctgagggtgggcaaggagcgggtgcgtcgattgatgcagcaacacggcattcgcgccaagggcaagcgtaaattcgtggtgaccactgacagcaagcaccggctaccggtggccccggatctggtgcagcgcggcttcacgcctgccgcgcccaatgtgctgtggagcagcgacatcacgtacatccccacagatgaaggctggctgtacctggcggccgtgctggacctgcacagccgtcaggtggtgggctggagcctgcaggcgcacatgcagacctcgttggtcaaggatgcgctgctgatggcgtgcttcaggcgaaatcccacgccggggttgatctttcacagcgacaggggcagccagtactgcagccaggagcttcaagccacgctcaaagcatggggcatacgcagttcgatgtctcgcaagggcaattgctgggacaacgcccccacggaaagtctgtggggacacctgaagactgcgtgtgtgcacggtcagcgctttgctacccgcgagcaggcacgccaggtcgtgatggactggatcgccttctacaaccattcacggctacattcggcgctgggctatctcagccccatgcaattcgagaaacgctggttggcggcgcagcacaagtctgccgcttga

SEQ ID NO: 535777 - DNA, 342 bp, Stenotrophomonas maltophilia
atggaagtgaacgagaagcagacgagagcgaagtacacgctggagttcaagcaggaggcggtgcgacaggtcaaggccggtcgggctgcgtcggtggtggccagtacgctgggcatgcccaaggcgagcctgaccaactgggtgcgggccgaggccaaaggtcaacttggcgtgtcggccgaaggcaagccaggcgcaccagtgatcacgcctgagcaggcggagattgcccgactcagggcgcaggtggcgcgactgacgatggagcgcgacatcgcaaaaaaagccgcggcgtactttgcgcaggacgtgctgcaaagtacgcctggattgggtcgatga

SEQ ID NO: 535778 - DNA, 1128 bp, Stenotrophomonas maltophilia
atggagcctcgaccagaaaccgcgagcgacttggtgacgacgccgactatttacgactggattttgagtgagctggatatatttgagcgcagcccaccggttaactaccttagcgcagcgctccagatcgcagttttccatctactccgatctgggatatcaaataatgttgatgaagaaagctttaccgcggcgctgcttggttcgttctgcgagtcctgccaagtgtgcgtggccggcatgccacctgctaacaactcatccttgacgtggcggcggcacaacaaaagcagtaaacggacgcatggagagtctgccacaggagcagatttttctttgataattcgccatagcaacagctttgcgcgagcagcggtctttcaggcaaagaatggtcaatcagatgtaggtagcttcaccgcggagcatctctcgcctgagacagagcattacccccgcgaacaacagttcgttaggctaagacgttattgccttggcgtcctcgcgaaaattaaaaatctgaatgaagaatcactagatcagaagaatcttgactgggcacactatctcatctacgaaaaatccgccgtctactgctcccccttgagctccctgaccgttctcaacgatcgaatcaataagaatcactcgcctggcaccgtcagatataagaaatatccttactccaacttcgtcgacattctcatgaatgggtgcagccaagaaattggatttcaacgtcaacccggctggctaagccttgaatcgcctagtgatatcaccgatttcgttgattcaacaaaagatctttacgatatttacgaggcacatgtggatcccacgattgactgggtgcctctaatagaaaaccgcgagactctatcagatcaagaaaggattcgactgataaaagaaagtcttctctcgacttcagcgaagcgaccggcgcaagcaactgagccagaatcagaatcggcagccctttcttcatccccagcgccaaagcaggccactccactctcaactcttctgaaagagcgaaaacaccaaaatgcgctcgaaactgagaaaaaaggggggaagttggatggaaggagcaggcgaggaacgaccgctagcaagccatag

SEQ ID NO: 535779 - DNA, 306 bp, Stenotrophomonas maltophilia
atggaacgctcgcaattcactattgatcgcgcactttattcggatgacgtgaccgctcgggccgcgcatcgctacactgacaagcttggtgtggaggtgcgcagtcaaggcaccgacctcgccgttatcttttggtctctggatggctccgagttaccagagaacctctgggcccgcttttctcgtgacttgcttgacgaacgccttcgagcagctgtgcggtcggaaacagccggtcttcagcaagatctgctgcgtgcagcgctgaaccaagcacagccggtggtggcccgtggcgaggtttag

SEQ ID NO: 535780 - DNA, 168 bp, Stenotrophomonas maltophilia
atgaatgaacgtttccctaaggtattccaggcagagggggccatcgacggggcaagttctgcgggcacggcgttcaacgaaagccacatccctgagcacaagtgctatgttctcggccagctgctggacacggcggacttggttgccccactggctatcgaatactag

SEQ ID NO: 535781 - DNA, 2001 bp, Stenotrophomonas maltophilia
atgtctgcagttgaaataaacgtggaagttccagtaataagctggctggaagagcctgtaaagaaatcggtcaattcggtgtttggaggaatcaacgccgcggttgaagcgatggacttcttcaaaaaatatcgcggcactcatttctcgatgctcaatgaggccgtcggcaaggtaaaggtccttgggatgtcatcgccactgatgctaatggacctgtactacacaacctatgtctcctccgatattcggcggcgcctatatgagtccgagtggcataccctccatgaagagcgcgcaaggtccactggcttgtcgcggtttcgcagcattgatggggcggcatatgtcgaaaaatcaaagaggctcgtcgtacttggcggccctggcgcagggaagaccacctttctgaagttccttgccctggcttattcaaacaaggaagtctttagtaaaacgaaattgaaagtagagaagttgccggttttcctcccactccccgacttctcgaaaacggacgacgacgtcctaactttcctgtcggccgcacttgtaatgcgcgaaggagattttgcacgggatttctttgagcgctccatgcgcaagggccttgcggtagtccttatggactctttggacgaagttcccgagagccggaggacaactgtgatagagagaatcaaggctttttgcaatctctatccagacgtgaaggtggtggtttcctgcaggactgctgattacaaggaaatcctagagaactttgatgaagttgaactcgtcagactcagcaagacagcggttcaatcaattgtaaggtcttggttcaaaggcagaaaagatttagctgacaagctaatcagcgtgattaattccgactccggaatatcaaatctaacagaaacccctttgctcctcagcttgttgtgcattcaattcaaacacgacctgatccttccacgacgaaaggtggaggtttacaagcgctgcgttgaaacactacttcgcgattgggatacgacgcgtggatttaggcgcgaaagctcttacgagtccctctcagatttacacaaagagagattgtttgagcatctggctgggcgcggcacggacaccggcctgacgtacatattctccgacgagagcgttcgatctatcactgcggactacatctcaaggcttggcatatcggccgaagaggctccgggaataatttcagaggttgagcggcatcacggtatcgtcgagcggcattcgatcgaatcactttgcttcagtcacgcgtcgatccaggattacttcgttgctcgcgacgcaatcagttgcaggaaagagcaagaaattgtcaaatcgaggatggatgacgagtcttggtccggagtgattgagtttatctgtgggctgcaccctgatcccactcagatatttgacttaatggttaagaaggcctcactaaaggacctgaagaactatcctgcaattgagcggcgcgcaaagctcctatatctcatttaccgatgcatgtccgtcggaccaatcctgcttcctgcgaaggccgtagagattaacagccacatcctgaattcgctgcaatcatttgtaaggctgatggcagggagtggtgtttatcccatgtgctcgtatggcgagggaggagtccgtcacccatacttctaccgtggtcagcagcggccctctctgcacgccgcactgctgccatatcgaaagctctcgaatgaaatgctgattcgcccggttccgggctttgcgaaattagcgagagagagctgcgatgagctgctagccggtcaaacactaggagaggtggaactttcgttgttactaaatatgattgttccaatgtcaaagctcgatccggacggcgtaatggatgtactttcaaaggctcgcggaagaatcgaagggtcgcggctttttgaggccattatcgatgagactttgacgaccatagccaaaaacgaagcgacagctagcgggtag

SEQ ID NO: 535782 - DNA, 132 bp, Stenotrophomonas maltophilia
atggccaagaagaacccccaacccgccgctgaccgcctcgacgccttgctggtggagcaatacgaagtccagggcgagaagcgcagcacctggtcgaagatcgcctggccgcaccaggacggaggcatctaa

SEQ ID NO: 535783 - DNA, 366 bp, Stenotrophomonas maltophilia
gtggcggatgtcgaaaagcaaaaactaaaactggcgaggattctggaagcggccgccaaggagcaagccaagctgctcgttgcggagaagcaacagaaggaacggctggcccggcaggctgcgcgtgagcgggcgaaagagcgcgccgcgctgtttcgcagcgccgatgcgcaccgcaagattgtgttgggtgggttgaccatcgctgcggacgcggaccactgggacccggcggaaatcgtcggggccttgttgctcgtcggcgagaagatgggcacgcatgcaccgctgcgcgagcaactgcgcaagcgtggcattgcccacctggaagcgcgtgaagcggcgcgcaaggcggcccggtcatga

SEQ ID NO: 535784 - DNA, 1650 bp, Stenotrophomonas maltophilia
atgagcgcgccccgtccaacaaaacttgcgcaagcctgcgcacatgcgcacggcttcggcctggtggaagtgcttttggtccttggcgtggcctcggccatatccgtcgctgcatggttggtgttcggtcccgcatcggtggccgccgacgtgaagcaaacgcaaatggacttcagcgaaaccgcaacggccatcgaccgctccttgggaatcgtgggcggcttctctgggctgtccacgtccctcgtgcgaaccgatgggctggccgcgcagcggctgcgccagggcgaggctttgcgcaacgtgtggggcggttcggtgtcgttcgtggcgaacacagttcgacgcgggaacgattcgttcttggtcgagacccgcgacgtgcccagggccgcttgcgccaagctggttgcagcgatggccggcgacccggctgtctgggatgcccaggtcaacggggaaagcgtctacgtgggcaacagatacgacccggccaccgccgccgccgcatgccaggcccacggcggggaccgcttgggcttcgtgtatttctcgggattgacctccggctcgtccgtggccgtgtcggccatcgagctccccccgcccccggtcggcgtgacccctgccagcccggcaacgccagtcgcaccggttaatggggcccccagcgtgggcgatgctgctcctggagcgcctggcgtggtatcgcctggcaggcctgcggctccgccgccggcggtgcctgtagccccgcccgcgccagcggtcccacagactccccagccaacgccggcggttccgcctcccagcacgcccacagttttgccggtctgcatggtgccgccgacgcaggcgcagaacgtgaactgcccggcagggcaagtcggaaccgtgacgcagcagcgcttgggttactgcggggaggtgggtgggccctatgaagcctgggccacgggtgtctatggcccatggaccactgttaccagcacctgcgccccggcgtgcgtggccccctcgtccacctcggtggccatcacccgcgacgcatccgccgaacgccaaaacgtaagttgcccggctggccaagggggagagcactggcaacagcgcagccgcgtcgagaacggcacgcgcaccacgtcctgggcatgcctggctgccgccggttcccctgtgtcgagcacgtccgatagctggagcggcacatactcagcggccagcggctgggtcaccacgtccaacacctgcaccactccagcaccaccggcaaaaacctatccgtcctatagcgggaggtcttgggtttcgtggggcgacggcgggctttacggctggggcgtcttttgctccccgtcccagtattacgctgaccagactcactgcacgcaaagcgtgaacacaaacgacgacgcaactttttcccccgtcctgcccaatgagcaagcgctgacaacagagcgccgggcctgcgtcgccgcgcttcagcagaggctgaccccgatgccagggtttggctacacccccagcaacgggcccgtagattggccgtccgaatgcgcctgtgaggtggtcggagctggctcggcgttctactggcaggtgactgggacgtctgactggtcggcatatgagttcaaatgcccctaa

SEQ ID NO: 535785 - DNA, 546 bp, Stenotrophomonas maltophilia
atgcagcgattcctgtttttggtcctggcggccctgaccgccctcccctgccatgcgcaagacttgcccgccgaactggcaccggtccacctggccgacctcaccagtcagcagggcgaaacgctgccgtctttcctgctacgcgtcggcggtgcgctccacggatacacgcgggaaaccggttttgaagcgtgtggtgccatcggcgagcaggatggcatttacagcgtccgcttgttttccgaccgggtgccccacggctgtgccgtgcgcaccagcacgctggccaagggcttcgcattcactggcgaaaccattcactcgcacccgcatgccaaggtattgaccatgaccacgcgcgctcgcgcctggtcgcagttttaccgcgacggccacgctggagcgccaaccctgcgcaacgatggagcgacgggtttcagcaaggctgaccgcgctaacggagatggctggttggtcgctggcgggcagttgctgcacctcgtcaacgggaagaccgagcgccatggctcggtcactacccactga

SEQ ID NO: 535786 - DNA, 228 bp, Stenotrophomonas maltophilia
atgaccaagacgtcgcacctgcttcccctcagcctggccctgtccgcggcactgctgctcggcgcctgttccagggacgcgcctgcgcctgcacagtcgccttcgggcaaggccggtgcaaccgccgtcggcaaggtcgcggtggcgcgcggcatcatcgacgtcgagggtggcctgatcgcgctggcaccgccggtggatggctcgatcaccgccgcaccggtgtaa

SEQ ID NO: 535787 - DNA, 1365 bp, Stenotrophomonas maltophilia
atgaacaacgtctacgcacggcctaatgcgcatgggagcttcagtcgctcgacagtagggctggctctgctggtcgcgttcttcgtcggcgcacacctcagactgtccatctatggcggcggcggcgtactggttccccagttcatctgcttggcagccggcgcagcgcttgcagcgctgtatcgcagggtgcttctcagggcgcttccgctgatgcttctgcttgccgcagcactgctgcttgctcccattctgaacttccctttcctgtccacctccgcagtgtttgagacatacaagggcagcatccagttactggtgtcgatgacgctcatgctcgctgtttcggcactggtaaccaccgttgagccagcacgactcgccaggttctccacgcgcctttggttgttctttatcctgcttgcagttcttgagttcgtcgccttgcgcgacgtgttcgaggccatcagccagacgatctattccgcatctggccgtggcctatataccggcgtcgagcgcgatcagcttctctatggtcagatccggcccaaggtcatggctaccgagccctcgttcctggccaccaccctgctctgcctgtgcaccatggcgatcctcagcatgcgctcggcgggcaagccgcacgctgtgaggaatggcctgctcatgctggccgtcacctacgttgtctgccccagcatgatcatcgtgttcttcatcgccgccattgcaacgtggatgtactggccgcggacaagaaaggggcgtgcactgatcctattcgctctgggcggcgcgttggtttcgacgcttattgcgcaatcgtacatgacccagctcgctgccctcagcaagctggcgcttggtgatcacggcgccaccggcagcttctttggacgcattgcagtgggaccaagcgtcggcatggatgtcctggagcgctatccgttactgggcgtaggtgtcggcaatgcagaggccgctcgcccgatcatcgacagcaattggctcgacaagggcgctttcgctctgttcccctggtttgcagacccaactctgcgtgcgaatgatctgatgtcgaacggattctggtggcaatggatctacatgggggcaatcggtggactcctattcatggcactaaccaaagcactgctgcgcacgatgggagtggctctaccgctccgagcgatcgtgtgcgcatggattgtctggtatgccggcgcggcattcgtcgatccaatatcttggtttgcactggcgatattctgtattccacctcgtgcggatgccgaagctgagacccccgccccaggagttgatagcgctgcaatggcgcctggagccagatatgcgcgatag

SEQ ID NO: 535788 - DNA, 1188 bp, Stenotrophomonas maltophilia
atgtctaaaattgagcacccaccaatcgcgcaccttgcatcactggactcttggcgcggaatatgtgcactcttggtagccgtgcatcatttcgtgttgttttcggttaatgaattcaactatcacacaattgaatcattcttcctctttgttgattttttcttcgtcttaagcggctttgtaatttcactaaattattcgacgagaattaaatcgactgcagacctcgcagattttatcgtacgccgctttgctcgggtctggcctctgcatgcaattgtgatgacgggcttcgtctgcgcatacattgtgattcgcgcaatggggacagagtcaccatacaccatcggtgcgagtagcacgacctatttgccgataaagtttcctctagtgctggcactctttaactcttttggtgctttttctggcggatggaatcttcccagctggagtatcagtgcagaattcgctgcgtaccttgtctttgctagctgcatgctttccaaataccgctacaccctgatttgcgcttttaccctattaggtgcctattacgtattcgtcgtgagcgaaacgcatatcaacttgaccgcaaacttcggtgtattcaggtgcctctatgggtttggcgtcggcgttggcgcgcaccatctctatgcgcatgccaagcaaaggggctcactcagtgccgcatcaaatacaagcactgaaattattgcactaattgcactcattgtatttcttcatgcatcagtaactccgtctggagaagctacgtccacctcagcatttgcgccagttctcttttcagccatcgtaattgcatactctgggcagcgcggggcaatcggacgcctcctaagattgaagccattcctcaagatcggacagtggtcttactccatctatatcacccactggctgatactaatcagcatggccgcagcttccaatgcgcttcatccagcctacaaacaggtcgaactctggggtggtatctattggaagtgggacctatcctcccccacagcctttctcatcgccctcgcaatctacctcgtagctctattatcactttcctcaatcacctatgccgcgattgaggatccttgccgaaaggctgcatccaattacctgaaacgcagagaagcagcgaatggggacgcaaccactgtcagcccgcagtga

SEQ ID NO: 535789 - DNA, 369 bp, Stenotrophomonas maltophilia
atggacgccggcaggcaggctggcgttggcggcatccagcttggccgcggccgcctgggagacttcccggctgttggcgccgaacaacatgaaggcggtaccgaccacgacctcatggccattctgggtcgccgcacccgtgcgcagctccttgccttcgcctacgctagcgacgtcgcggacgcgaatgggcacgccatcgcgccggtccagcacgatgttcccaatcgcgtccagattggccagctggccgggcacgcggaccagaaattgctggccgttgcgctcgatgtagccggcaccgatgttctggttattgcgcatgaccgctgcgaccacatcgttcagcgtaaagcccagtgccactaa

SEQ ID NO: 535790 - DNA, 4881 bp, Stenotrophomonas maltophilia
atgaaccatatctatcgtcgtatctggagcacagcgaagcagtgctgggtggttggcagtgaactggcacgcacgacggggaagggcacttcgggacggcgtgccactgtactgatggggtgcctgatttcactgccattcgcggctggttccgctgagttggattcagacggggagcagttggatctggttgaaaccacacagactctcgctttcgcagaacctgcccaagaggtgccaactgtgggcatggctccaatgtcggcgcgtgcgggccaaaacgcaattgagcttggctatctggcaggcgcaagtggtaatggcggtattgctattggacttagagcgaagagcaatgaagcctggagtgtagccgtgggcgcggacagtaacgcggcggccacgaactctgtggcggtgggggactcggccaaggcgactgcgcgtgctgcgattgctttgggcaagagcgcccggtcactcggtgagggcgatattgccattggtggatcagcgcagacagtgggtgttgatgctggtatttcacgaattgcgatcggtgcaggggctaaggctggaactcaaggccgcactggggcagtcgctttgggaggcgcgtccacggccgagttcgatggtgtttccattggctacaactccaaagcgtcaaaggcaggggcagtggcgttaggagtgcattccatagccgatgagctgaacacagtatcggtgggcaacaagaccatgaagcgccgtatcgtcaaccttgatgacgcccgcctgaccagttccagtaccgatgcagtgaccggcaagcagctctacgccaccgagcagaagatcggatcattgaatggtatgttgaaggcgggttcgcacacggatgctttcgtaattgggacaggctctgtgtccgcctcagccaacacggtgtctgttggcagcgcaagcaagaagcgccgcatccagtatcttgccgacggcgtgattggtgctggcagcacggatgccatgacgggtaaccagctgcatgccaccaacacgaaggttgcagcggtcgagaaaactgccaataccgcgaagacggatcttgtagcggtgcgcgagatcgcgcagaaggccacccagcgtattgacgcggccgcacccgcgctgggcagaggcgcgcttgcggaaacgggaacctacggcgccagcactgcgcttggcgatgccgccaaggcctacaacagtggcagcgtggccttgggggccaacgcgttggcgggtgtggacgtggacggaaagaagattgtcggatcgaactcaggtgtctccctgggtgtcaacagtcgaagtggcaatggaggcgtcgctgcgggcttcagggctgactccaccggaacctggagcgtggcgatggggaccgatgccaaggcgcaggccgatcagagtaccgctgtcggctatctgagcaaggcgactgccagccagagcaccgctttgggccgtggcagcgaggcaactgcgcagtacgcgagtgcactcggaaatctgtcgaaagcaaccacggtcagtgcggtcgcgctgggtgatcgtgcccaggccaagcatgagaacgccgtggcactgggagccgggtccgtcacctattccgccaactcggtctcggtgggcaacgcctcggtcaagcgaaagatccagtacgttgcagatggcagtatcagcaagagcagcacggatgctgttactgggagccagctgttcgatgcccagcagtcggtagccaaggctcagacggcagctgacagtgcactggcgaaggctgccgctctctctgggcttctgaacgagagcggcgcctcgggcaatgttcggctgggtggaactaacagcggcaccctgctggacgtgcggaacagcgccaatgcgagccgcaagatcaccggtgttgccgatgcagcattgtccaccaccagcacagaggcggtgaccggccggcagctcgctgccaccaatacccatgtcagcactgcgcagagtgacgccaacaaggccaagaccgccgcgaacaccgccctgacacaggtgggaacgctcaacgggctgctgagccaggccagtgcgagcggcgacgtccgtgtgggcgggaagaacagcggcaccgtgctggatgtgcgcaacagcgcgaacgcgaaccggaagttggccggtgtgactgatggtgaggtcggcgccagcagctatgaggccgtcaacggcaggcagctcaacgcgaccaatgacaaggtggcgacggtggagggcattgccaggtctgcgggcactgaagctgccgcggcaaagacagatgcagccagggcgctgaccgagaccgcagcgctgggtggactggtggcgcaggtatctgcttctggcaatgtgcgattgggcgagaagaacagcggaacgaccttggacgtgcgcaatagcgccaatgccaatcggaagatcagtggtgtggcggatggcttgttgagcgtcagcagtgctgaggctgtgtccgggaaacaactgtattcatccaattcacggatctcagttctggaagacgcaagtcagtttctgagcatcggcgtggcgcccactatcgaacgcgccgaggctgggctggccggggtcgctttaggtaactcagccaagaccggcagcgatggagggacggcagtggggaccctggcaaaggcactcggtagaaactccgtcgccattggccgcgcctcagtcgtgcacgaggattccgatagtggatttgcactaggtgctggagcggaggttggcattgcgggaggtggcgcacggggaggcgttgctatcggtgccggggcaaaggtgggcaaaggagcgaatggttcgctggcgattggcgaaggctctcaagcgaatgaggccggagtggcttcatttggaagtgcaactgcttttcgtcgcctggtgaacgtcgcgcgcggtacggccgaccacaacgccaccactgtctcccagctcaatgattccctcgccaccctcgggggcggcgcaggcatggacggcagcggcaacatcatcgccccgacctacacggtgcagggcggtacgcagaacaccgtcgaggatgcgttgatggcactcgatggtgccgtcactaccgccggccgtcgcgcggacaaggtggaaggtcagctcagttcgattttccaggattcaccttcggcccgtgccgacggcacaagccagatcgcgctgagtggcgtgaatggcatggtgttgaccaatcttgccgacggccgagtggcgcaaggaagccgtgatgccgtaacaggcagccagctgtacgccgcagagcagaagatctcgcagaatcgggatgatctggacgcgatgcgcaaggagcgggagatgggtcagcaggcaatgcgtgggttggatgcgagcgtcatcgactacggtggtgcgcgtttgactggcgtggccgaggcgaagctttcggctgatagctcggacgttgtgcgcggcagtcagctctatgagaccaatagccgtgtgtcggccttggaaggcatcagtcaatacgtcagcgtgggcacggctccagaatatggtcaggctcaggctggtccggctggtctcgccattggaaacttggcaaagacgggcattgagggtggcacggcgattggaacattcgccgaagcaatgggtagaaattcaattgccctcggacgagcatctactgtctacgaaggctcagattccagctttgccatcgggaccggagctgaggttggtagggctggtgagccgggtgcaatcggagccattgcgttcggcgttggatcaagggtcgaacccggagcccgcgattctatcgcgttcggaaccagctctcatgcgaccgaggcaggagttgtatcgtttggtaatgttggaacgaagcgccgcctcgtaaacatcgccaacggcaccgccaaccacaacgccgccaccgtcggccagctgcgcggtgcgctttccgctctcggcggcgaagtcgatgccaacggcaacatcgtcggcccgcgcttcaacgtccagggccagacacagtccaccttgaatggcgcacttgaagcgctggatggtgcggtcgtcaccaacgcctcgcgcgtggacaaggtcgaaacccagctccgctctgtcttccaggatgccccctcggttcgcgccgacggcgtcaaccagctcaccctcgccggtgccaacggcatggtcatctccaacgtggccaacggcctgatcgcggccggcagtcgcgatgcggtcaacggtggccagctgcattcgatgcagcagcagctcaacggccgcatggatgggctggagcagcgcatcgacgatgccccggcaccgcgtgcactggcgtcgtcctcggtgccgaagccgcaggccgaggaaactcctgtggtgccggaaggcaaggactcccaacaggtcgcctcggtaggcgagggcgacaagcccacaccacagccgaaggccaacaaggacgactcgccgaagccgcaggtcgacaccgccgagctggagaagatgctggcccgtgccaacgagtacaccgatggtgcgatcagcaacgtcgagcgacgcctggacaagatggacaagcgcttcaaccgcatggcggcgatgagcagcgcgcagacggcgatggcgatgaacaccgccggcctggccacctacaaccgcctcggtgcgggtgtgggctacagcgagggtgagtcggcgatggcggtgggctaccagcgcgtgctcaacgagaagggctcggccaccttcagcctcaatggtgcgttcaccaacagtggtgagcgcagcatgggcgtgggtgtgggcatcggctggtaa

SEQ ID NO: 535791 - DNA, 288 bp, Stenotrophomonas maltophilia
atggcctgcggcttcacttgcgctcagagcgcgacgatgctctcacaggtgagagaattgccactacgcaagctgcagaactccagcacctggttgaccaactccgcctgcagatctcagagctcacagagcaacgggacaccgggcttcggagagccgatcgaactgaggcggcgagacagcaactggatattcggcttcaagaagccctggaaacggcgaaatctgagcgggaggactggaccgagtacgtcagatctgtcgagaatcgggcgctcagcgatgtga

SEQ ID NO: 535792 - DNA, 447 bp, Stenotrophomonas maltophilia
atggttcagcatagcttcccttccgaccatcaccgcagcctcgatgtcctcaacggggcatggcagaccacaatcattgcgctcgagcccgatggtagcgcagggggcatgtcgcatgcgactgacatctattcatggctgccgaacgggcagttcctgatgcatgaggtggacgccatgatgggatcgcagcgcgttcagtcgatcgaaataatcgggatcaaccgtaccaccggcgagttctttagccgaagttacgacccagacggcagcacgaatgatttcgtatccaggatcgacgagcgcaactacacgattaaagggaaaagccagcgtttcgttggatgcttcagcgatgatggatcacagttgactggcgaatggacacaactggatggtgatcactggagtccctttgtcaggatcgttctcgagaagaagctgtga

SEQ ID NO: 535793 - DNA, 165 bp, Stenotrophomonas maltophilia
atggtcattgagcgtggggctgggtccggcaatacgctggcttgttggtcgcactcagtcgccctaagatcgagcatcatcgaggcgaaggtcctcacgcgatgctttgagggtagtctgtatgactggacccacgggtccacctacaagatgattggtccctaa

SEQ ID NO: 535794 - DNA, 336 bp, Stenotrophomonas maltophilia
ttgggggggaatgtggcgagcttcgagttcacggcaaaccgatcttttctgcacgcttctggccatccaatcactatcccaaagagtcaattcgcccatgatgaattgctctccctcaaactcgatcacaagctggtcttagtcacgctcccgcatggggagcggtatgaggccgagatctatcatggtaccgccggatttggtgagtattaccagatccgcttcattggtgctggtcgcagcctcccaagctaccttaggctcaatgatcggctgattgtcctgctggagaaagctgccggccgtagctatgtaacgctggagtatcgggtgtga

SEQ ID NO: 535795 - DNA, 1116 bp, Stenotrophomonas maltophilia
atgggactacacgttgtttgggaagttctggacgactcggtctacgataaggccgagcttttgctcccactggatgagagctttcagaagtgcagtgggtggtcacgacaatgtattggcgagaaaaggaatcggcagatgctctctccgggagaactggagctaggattttcattctctggctatgatcagacacctcgtcagcgcgtaatgatgttccactcgatgggtggaagttacccccgggggacattcttctgtgatgacggcttcttccacgccgatgcggatctcgtcttcagcgtagtgcgttgctcgggctggcggtccattgatgaagatgttccattctccgaattcgcttgggcgtcgcctgctcaagtaaggctgctgggtgcactgcttttctgccagaccttcgacggtgcttggctaaggctttaccccgtggtcggaccagagctggtgcttcgtgcgaacgagcttgatctttctgacccaagtaccgtcctgttgatcaaggagcggcttctgctatcggtaaagacgaagcgcctgcaatcgagaattgcccatgtccctatcagcatgttgggcgagccgtatcaccttctggacagagacatcgaaatggatcgcttcgagctgtcctacaaaagaatcgatcccgcaaacttcgtactgatgcgaggtattcaaactctagtgaagtctgacatgctcgggcggcaccaagagttcggcgaggagtcggtgattgccgcttttatctcattggatgcatcgttctcgctcgtccagcggaagctgaagtcggaaggcgtggccaatccatcggcgcatgatgcggcccgatggctccatcgtaacttttacgagccatttgaccgtgagccgcccggggagctggaaaagtacttcgaagagttctatgagagcaggatctcaacgctgcatccaggaagtcggttcggagactctccgttctcgccgaccatgtgggatgacgcagttcatctgagatcacagctgaggcaagtcttctcattcctcgtgcatggggcgcactttaaagacttcgaagatgcggtcgacgattaccacgcgcaaagatga

SEQ ID NO: 535796 - DNA, 447 bp, Stenotrophomonas maltophilia
atgaccgtattcgatcactccctggtaaccctccgattctccggagatgacctcactccagccgcgatcactaccttgctgggtgccaatccaaccgcatcgcatcacaagggccgggagctcaaaggcagccacttaggcaccgtgcgtatcgccaggttcggaagctggcgactcagtgcggctccgcgtgagcctgaagatctggaagtgcagatcttcgagatcctcgatcaactcaccggcgatctcgctgtgtggcagtcattggcacgcttccggcctgacctgttctgcggcctcttcatgggcagcagcaacgatggtttctcgctttcgccccgcgcgctgcttgccctggggcagcgcggcatcgagctcgggctggacatgtatgatgccaatgaagaagcgcgcaacgcccaacgccagcaggtcatcaattga

SEQ ID NO: 535797 - DNA, 252 bp, Stenotrophomonas maltophilia
gtgcaggacgaccacgacgacaccgatacccccggctgggacgcgatcaatgcggcgctggcgccgctgtatgccgggcaggaaccgcgtcacttcggcaccgcgcttccgtacacgctcggtggccaggatccgctggatggcatcagcgtgtactgggcggatgcgccggtaccgcattggcattacatcacctacggcttctccgagctgtacgccaaggagagcagtgatgccaccgccagtggctag

SEQ ID NO: 535798 - DNA, 414 bp, Stenotrophomonas maltophilia; identical to SEQ ID NO: 494223

SEQ ID NO: 535799 - DNA, 408 bp, Stenotrophomonas maltophilia; identical to SEQ ID NO: 504166

SEQ ID NO: 535800 - DNA, 423 bp, Stenotrophomonas maltophilia
atggcctggtggcgctgggcagccaccgcgctctgtcttgtggtggtggttgcggcacagacgcagtggctggcgccgccggtgccctcgcctgtcgcgttccaaagcatcaacgatgatcgattctcacaactgcgccgccaggcgatgcagttcgtggactctcggcctcggcagggcttccagttcgttgagcggcatcgagatgccgcgttccaggttcattgccgaggaatacccgtgctgtggatggagaggcgctcgcaacatctgctgttgtgggcctcactggacgcgaagcggcgggggggggattacctggagcaggtactggctggcgtgccggaacctgttctgttggatcgggtgctgaagattcttgctagtgatgtgcctgacggggcgcgatgtggcgtgccgtag

SEQ ID NO: 535801 - DNA, 639 bp, Stenotrophomonas maltophilia
atgggtcggcctcgaaagtttggccttgcggccgactgttcgggccttagcggcgacggtaggctgtttcgtgctcgcctatcttttccgccacacggtggccggcctatcaccggagacgcgcgaaagcgcccaggtgatggcctatatctggctccccgtgctggcatggatggcaatagcgcccttccttcggccgaggcccccgaaaccgtgatgatgaacccggccgcaagccgggttttttattggcgacagcttcggagatccagggcgggccagttgtcaccatcggccggaatcggtgtcaagggcgggaccggaggccgcagcccggagcgcagcgcagggaccgggcgaggatgccggcgaagcgaacccttgatgccgatggagtgcccccaccctcacggcggggatgcagggagtcttaccccctgcatccctgccccccggcgagggcgggaagtccagaggggcagcgcccctttgggcaagggcgaagcccgcgcagccaaggccgcgcttatggcggccggcgatgccggccagtatgaccgcatggcctacggccccgcgcgtgctgttgtcggcgtggaaaagcaggtgatcgcgctccaccctcgcccttcgttctaa

SEQ ID NO: 535802 - DNA, 300 bp, Stenotrophomonas maltophilia
atgccttaccccacagattcagtcgtcacattcacgctgaccattctggtggagattcttgtcctagggttgatcgtgcggccatggcggtttcaccacctgtggctacggatgcttgcctgcatcgttccctggctgggctggacagtcctttggggcatggccgccatgcaccaatcacctgtgcgcgacgtgcacatgctctggttgctggccgccagcgccatcttgctgctggcgctgcttgtgatcgtgccggtctccgcctgccctcggctacggcgttggctcagccgctga

SEQ ID NO: 535803 - DNA, 582 bp, Stenotrophomonas maltophilia
atgaacactgaagacaaggaagacgacttctacgagctcttcgagttggtgccgccgacctttagcgaggcgtgtggccaagtagagtcgagtttcggactggagggcgacccgatgaccgagaagatgtgcaccatcccgttgaccgccagacaggtgcgatacgttaacgagactctggatcacgcccgccaacttcatcggagcggcgatgtcgaggcggcttggtatcaccacggatgcgccaaagccgccgttgcagaacggaacggcttcatggagggcagataccagtcgtccgacgccgctggtgccactcgagtggccgcccactacggaaggcagggttcccaaaaaaagaaggcgatcaacaaagagaggcgggaggcttttgccgaccttctgctggctcagcacaaggaagagccattcaagattcagcggcagttgaaagcagccgccgccaagctggggcctggcggcggcgataaggtctcggacgatgcgtggggcctccggctcatcaaagagacccgtctttccgatctctaccaaagcctcagccgtcgccggaaaccttga

SEQ ID NO: 535804 - DNA, 1062 bp, Stenotrophomonas maltophilia
atgaagaacagcagcacctttctgcgcgaacgcgcctatgtttggggtgaagacgggacccgtctcattacccaccaattgaccgcggtactggatgtgaagcggatcgtggacatgatgggcaagttgatggcaggtcgtaagcccgcgttccgtgtctactcgaagttcggtcgccattgggtggaaaagaccccccttggcgagaccattctgctttgcctgaagtgtgggttgcaggagatcgaggaacacttcccagcccatcggcatagcccgctgtacacgctgttcaagcgctttctcggtccgttcgcttacatgggcggcagagcatggccggagaacgtaccgatgctcaacgccgcggtggcgaagatccgagccttcgcgaaaggtaaagccctgggccggcggatggacaacttgaagcgagcggagcgcgaaaacgccaagtcgtgcaagcggttgttgcgcatgatgcgggatcgctattccaagttgctggttctgcgactggacttggagtacttctccgaattctgtcccggtagtggcttccgtggccaggcgatgacgctgaagcaggcgcaggcccaccgcgatcgcttcctcgattatctccgcaagggtccctacgccacgcacttggctggctacatgtggaagctggaatacgggctggagaaaggccaccacttccacatggccatcttctttgacggccagcgtgtcgtccgcgacatcatcctcgccgacatcctgggcaagtactggcaggagaccgtaaccggctcgaaggggatgttcttcaactgcaacaagaagaaggaagcctacgagcgttgcggcatcggcatggtcaatcgaggggatgacgagaagtggtctgccctggcggacgcgctccgctacctcaccaaggtcgacctctatctgcgcttcaggccggacgggcgtgcgcgtaccttcggtactggtggcccctacggcggggtcgcacccggtcctggcctcgcgccgtccgtcggactgaagatcaaggtttccggcgacggctga

SEQ ID NO: 535805 - DNA, 237 bp, Stenotrophomonas maltophilia
atgcaatccaacccctccaaacccttccagatgctgcgccgggccgaggtccaggctcgcttgggcatcgccaagtccaccctctacggctacctcaacagccggtcttccagctacctgccgagcttccccaagccgcttcacttgggctcgtccgtcctgttcttggaacatgaagtggacgagttcgtcgagggcctgattcaggcaagggaggtggcgagcgggcagcgctaa

SEQ ID NO: 535806 - DNA, 507 bp, Stenotrophomonas maltophilia
atgcttccctcgcacggctaccaaggcttccgctctgcacctccgccttctggctgggtcaagatcggggagggctgggtgctgtggtggagcggccggcagatcgcccacgtgtcgccatcgaaggatcgcggcgctcgcgtgcatatggacgtcaggaagatgtggcagaccaaggacgtgcgcgcggctagcatcgcgcaaggcaagcgctacgccgagcgttggtgcgcggccaggctctaccctgagctgaggatgcgagaagcggtggccagactggtggacagcacgccgaccgagctgccgccgccaatgcccggattgccgcccactccggagcagctgcagcaggcccggcgcttggctgacgccgggacgacggagctggagcgggtcaaagaagcgctggagccgcgcaagccgccagcgatagccaagcccaaggcgaaggatccatggaagggaagactccgatccagcagggccgaatccacaacggtgtaa

SEQ ID NO: 535807 - DNA, 474 bp, Stenotrophomonas maltophilia
atgcctaacagggcaatggtgttcgtaagcgaggctgtccctagcctgggctctcagcggttggaattgctgatggccgacgccgagaggttcaatcgcgacgttggaatcaccggggtgacgctgttcgacggcagcagattcctggcctacatggaagggccagcagatgccctaagtgtggtctacgccagagtctccggctcgacaagccacgcccatctaatcgagttagcgcagggcagggtaggtcagcggcggcttccctactggccaatgcgtctcttgcaagttactccgaacgacctccgaagcatctcagtggcggactggtcaagcttagtgcaacgcggtgacgccgatgcgctcaatgccacggccatggatctgctcgtgcggctggcctctggacacacgacacctgtctactctttgccgtcggctgaagatgctgggctgggcgcttcaatttga

SEQ ID NO: 535808 - DNA, 363 bp, Stenotrophomonas maltophilia
atggttgacgcagtgattcacaacaggatgcacagcgtgactggtgcgctgttgtatgacggcaggcgctttttccagtacatcgagggaccggccgatggcctggcgcgcgtcctcgctcgtatcgaagcctcgcgcaggcactccggcatcgagattctgtttcgcggcgagatccttgaacggcacttctggaattggtcgatggcctgtcgccatgccgacgcgtcggttgtccaacgtctggaagaggcgaggtggaccgagcgcgcgcatccgcatcttctcgatgacgcacatgccaacagcggcttgagcatgctttccgacttctggcatatcgatccccccgcatcctcttga

SEQ ID NO: 535809 - DNA, 288 bp, Stenotrophomonas maltophilia
atggacacccccaaccctacccgcgccaatgccgacgttttagcagagcttgccgctcacctgggctatatcaaggcgcttgagtacggcctccgcgcagcaatcgccgcacaccccgccgcagaagcaatgtcacttctgtgggcgcagatgcttcccgagatctcggaccgccatgcctcgactggccacgttgacttcaattcggctcttcaacatggccttagaacggttggcgcgcaaatcaacgaggcggcgggggtcgcgccctatgatcctgtgatgtag

SEQ ID NO: 535810 - DNA, 219 bp, Stenotrophomonas maltophilia
atgagcaactcgatgtggaacgtgaatgcgttaggacttggcaccgtggtgatgcttgctcttgccctgcctgccggcggggtcgctctggcatcccacctcgcggtcttcgaagcgcgtgcctgcactggattatcccaactgcaggaaggctcttacgagtacgagcagaggctcgcagagtgcatgcgggatggccgaacacttccggttaagtag

SEQ ID NO: 535811 - DNA, 510 bp, Stenotrophomonas maltophilia
atgggtgattccgattggctagccgcccaggccgagcacgagaagaacagccggctctatggtgggaagcctccgcttcgaccggtatggcgtgcactgctagctgcgctggcgtggtccgttggctctgttgtcgccctatccgcggctctcggtctggccggcttccttctggctcggtatggctctgatgagtacgtgctggtctgcgaagggacggtctccgcagatggtggggatggagtgcccgcgaccatgtacgccgagatgcgcgagtttgggcagatcatccggctgtggagcaaggatgcggggacagtgaggatggagatccccaatgacttttacgatgccgggcagcttcggtctgccggcagtcttacgtccatttccacttacacggggctctctggccacttttcggtcctgagcggcgccttggtcatgcgtatggggaaaggtcgagagttccaggggcagtgcgtgcgccgtggtcagccggccagctag

SEQ ID NO: 535812 - DNA, 210 bp, Stenotrophomonas maltophilia
atgagcaatgcgaggcaacccgaccatggcctggtcgcccacatctatgcggcggcggccgcgcaagcgatttcccggcaagagggaccttctttcgaggagatcctggctcagtctattcaggctgcaagggtcttcgcgcaggagatggcggggcgagacagcaagcagttcaacaactggcttggttccctgcccggcatgaagtga

SEQ ID NO: 535813 - DNA, 1473 bp, Stenotrophomonas maltophilia
atggccaccttctatgaatcgttcgcgcagggcatgcagaacgggcttgagcgccagaaggccgtcactgagcggaaccggctggccgaactgcaggatctcggtcccaaggtcatctctggtgatctggcggcaactgatcgtgcattcgcactggacccgaagacggcccagtcctatcaggccgagggcaaccgtcagcacgaaaagctgattggcttggccaagtccctgaagcagtacgcaagcagccctcagatgcaggcgggcatttatcgcagcgcggttccctacctcaggcgaagctttggagcggaaattcctgaccagttcgacgcggaatcggtgatgccgattgtcgatcaggttctcgctgttgccgcaggccagcccaccgctcagggtgatcagttcacgctctcgccaggctcgaagcgctttgacgcaactggaaaagtggttgctgaagcgccgttcgcgccggccagcgccaacgtgatcgatgtccctgatgggcgcaatgggtctatcaagatggtgtgggatccggtaatgcgccagcttgcgccgttgcctggagcgatggcaggtacggcagggacacccacatcgatggcaactcccggggcggccgcagcgacaacagtattccgggctcccaacggcgagatcatagacatgtctaaggtcaccgagcctgggctgcgcgagtcgatcttgcagaatccggaagaatgggggttggtgccggacggtgggagagcacagcttccggatcggaacatcgctccgccgggggggctcggttatacaccacccaagcaacgagaggcccctagcggctatacgtaccaaggggacagcctaacgccgatcccgggtggtcctgccgataactcatccccgcaagcagtggcaagtggtgagcagagcctgcggaaggaggtgacgcagaacctcaaggacgaccaaggcgttctttccatgtatcgcaacgtgcaggccgccgcccgccagccaagtgctgcgggcgacctcagcatgatcttcgcgtttatgaagatgctcgatcccggctcggtggtacgcgagcaggagttcgcaaatgctcagaacgctgccggtgttccggaccaagtacgcaatgcctacaacaaggcaatcagcggtcagcgacttaatcctgctcagcggcaggacttcatgaaccaagcggcccagcttgcgacaaacgctgaggggcggatcaccgggacgacccgcaagtatcaggagattgcgcgccagtacggctacgaccccgtacgtggcacgggcatggccgacttctccggagttacaagcagcgtaagcggtggtccgcaggcagccacgggtcctgctcggcctcaaaccgaagcggacttcaacgctctacccagcgggtctctctacatcgacccggacgatggtcgaacctaccgaaagaggtaa

SEQ ID NO: 535814 - DNA, 744 bp, Stenotrophomonas maltophilia
atggcagctcgagaccatgagcggtacgtggagatggtgctgctggcggacgaggcagtcgacttggttgtgaggggcatcgctggcgcgtttgggtacggggcgaccacacagcctgtcgtccggcacacgccgaggcgtggctccagcgacgaaccctgttcggacgagggcgcgcacctgcccatccacagagagcattcgattgagcaggcggcatccaagtacctgccgacgcagccggcggcccgtaagcaagccctggaaaggttcagcccgaaggatcgccaagaggtgctggatttcgaccagatggcgctgatgcgctcacccgctgcggctgatcgcactcgccaattacggacgtggaagatgcaaggctcgctgacagcaatccctgccagggggccgaataggctggtgctgcatgcaatggcagatgcgcaattggacggtccacttggcgcttggctgatgctgtacgccacgggtgacgagagaggctggccgtcggtctgccggcacatgaccgcatgcggccatccggagtgggcctcgttggaagcggtgcggagattgctagttggtcgaccccagcggtcttatcgagaatcggccaagagccatgcccggcaagagcaacggtttcgcggcgaggtgcagtcggctgagaggcgtctgcttgaatggctgagccgcgccagccggagagtcgccgctgcaatgggctctgcctgcgactag

SEQ ID NO: 535815 - DNA, 543 bp, Stenotrophomonas maltophilia
atggctaggatcggcaaggccttccggcggccagttcgtttcaacaggacgcgtgccaatcccatgcagcgcctcccgttctaccgtcaaagccatgcgaggctgggtgactactggcgcatgccggagccccagggccatctgatggggcgagaggtggggaggatttgctgcatcgccttccttcaggccatcagggaggcgtcagcagacccgcacactagcgggagtgcccatctggccgatattgtctgctcggtggtcgaggcgtacggcggacgtctggatagcgctcagcgaggcatagtcgacgggttctttggaacgggatcgccgctgagggatgttctgatgcggggccttgaagccaagaagcgaactgactacaccatggaacaattggaggaggcgctcagcgacttggcatcggtcaccatcgaggagtacgccggtaggcgcacggttccagtccaatgtctgatccctgacaggtccgaccatcctgcattcgaattgtcatccctggacgcatggcctcagtaa

SEQ ID NO: 535816 - DNA, 687 bp, Stenotrophomonas maltophilia
atgcttaactcgactgtagcaaggaaaaggcaggcaaaggatgtactcgaagaccgtattgaggcgctgattgaagctggtgtaccgatccgaactttgatcggacatcagctctgcagcatagactggcttgctgctcgaatcgaccacaagttccggctttgctatcacggcgagcgcggtgaagtgattgttgagtccgtttctgcagccaggctcctcactcgtggcagggagctaggctggcatccgctggatgaagaaccgtttgagcttggatggccagacctcttcaaggagccgctgtatcaccaccggcacggcgtgcactggtatgcgactgctatctcggacacggatcggctgcttccactcgcgtttcctaagtctgttcttgagagagacagactagccacggaagcagcggctgagagggctgaaagtcgattgcgtcgccagcagaaggctagggacagagccttggctgccaaagaccgccaagctgatttggacaacttgacgcgtatctcagagcggatgctgcaggaggctgcacagaccggacgcccgatttcagttgcgaccgctcggcgaaaggcgagggtatggatccgtcaatgggagcaggacatcacgtccatcatgaggcgtttcacggacgggcagggaggcgataagcatggctag

SEQ ID NO: 535817 - DNA, 390 bp, Stenotrophomonas maltophilia
atgaaggagccggggcttgtgatcgacaagctgtggctgagctatgagcgcgctgccattgatgcgggccttccgaagcagagcttgggcgcggaacttgtgcttggcggctggtcaccgaaaagtgggcggatggtggcgacggcctacgccaagaacgacagcactactcccgcgatcgtgcagcagctcgatgggggcctggcctcgccaggtgaaccactaagaggccgtccagacagttttgcgtcggaggacgtcttggctgcggcaacgcttcaggcgaactacctcaacgaggagacgggccggcaggtcgccggcggccgtctgctgattgggctcctccagcagggccacgcggtgatgaaggaccttggggcgatatga

SEQ ID NO: 535818 - DNA, 1311 bp, Stenotrophomonas maltophilia
atgacggaagatttcgacccagtcgatgcagcgactcgtcttttcgaggcgctggcgcagcttgttgatgaatttactgaaaaatggtccgagacgaaatttgtaagctacggcacctatggtcccgtcatcgatgcggatgatatccgagcaaacttcgacatcattcgtcagcgctacaaggactacgactggtcaacggttgatgttgagagagcggcggtctttctgccggacttgaaggtcaagactgacgaagcgcgcaccaggctcttgccatatttacagagtgatccgcaagtgatcgcttcactgcagggactgatgatcacgctggatgtgcagctccagagtttcctggatccaaaggtggtcagtcagatatggacccttccaggagcgctcaagaaggacattgacaccgcaaggagacgtctggataaggcgagttggggtttggatgatgtcgatcgtaagctcgaaagaatcgcgtcggcgtacgatgttgcagcgaaccttgatgcgacgagggaagaccttgagcaggccttggatgacgcaaagacggcgaaggaaaatgcgctgaagtgcgaaggcgctgctgcggaggccgtaggaggcgcctccgacagcaaggcgaggatggatgagctaatgcaagaagcagagctcatgatgaagaaggtcggtgccgcctacgctgctgcaacatctgagggactcgccaaatctttcgactccaaggctcgatctctggggaactcggtttacttgtggggaggagtgctggttgtcgctcttgtctcagcagttgtcattgggttcgtgcgattcccaacgatcttggatgccgcaacgaaggtagccaacggcggctggcccttcctcgtggcgcaagttgctctggccactctgtctttagcggctcccgtttggctagcctgggttgccaccaagcaaaccggtcaacgatttaggctgtctgaggactatgcgtacaaggcggctctggctgccgcctatgagggctatcgggccgaggcagcgcgcttggacgaggtgcttgaggctcagttgttctctattgcgatgagtaggcttgatgagatcccgctgcgactcgtagaggatcaagtgtcaggcagcccattccatgagctgctgacatctaaggagctccacttggccgtccgcagcgtcccggggttccgtgagcgactggtggcgatatttaggcggcagaggacggagtctgagcttgggaaggctgtcatcgccgaagcattggccgagaatgctactggcgggtga

SEQ ID NO: 535819 - DNA, 330 bp, Stenotrophomonas maltophilia
atgaagatcgaagccggcatggccgccaccctgcacaccgcccgacaggctctgagcggtaatgacgccaccacccagaccccgttctcccagctgctagcgcaatcccaggcccaaactgccgcagcgccaccgcgtactgtaggcagcgtgcgcgagatcgatctggcagggctgctgaccgcccgcgacaaggccatcctcgggtggccgggcaacaccgatgatctcaccagcgtcgcggcaggcattctcgcactggaccgcgaagccggcgtggtacgcggggacgtcagccgcgagtatctgtttggcgacccggccaagtga

SEQ ID NO: 535820 - DNA, 360 bp, Stenotrophomonas maltophilia
atgaacaccacgacccgcatcagcactgcagaacgcctcggccgcacctttggccgcggatggcgcgcctacgcgcgcggcgaacgtcgggcgtcgaactggttggtgtccaagggggtgccggcggccattgccaccgcgctcgtgcgggtggtcaagcttgttgcgctcgggattctggtgtacaccaccttctggctggccctgctgctggtgtgcgtcatggtcgttgcctggatggcccgtaacgccgacttgggcgaagggttgcccgagccagagtggcgaaacggaccagcaggattcggcctatacacctatgacggttttcgcattgatcctcatgtcgaggacgactag

SEQ ID NO: 535821 - DNA, 993 bp, Stenotrophomonas maltophilia; identical to SEQ ID NO: 329584

SEQ ID NO: 535822 - DNA, 420 bp, Stenotrophomonas maltophilia
atgaaaatcggtgaactatcgtcattggcagggtgctccgttcccgcggtgcgcttttatgaagcagagggccttctgcaggcgcccctgcgggccgccaacaactatcggcaatatggccaacagcatgtcgacaggttggccttcatcgttcggtgccgctcgctggacatgtcgcacgacgatatccgggctctgctgcagttgcaggacgaccccgccatgtcctgcgacgaggtcaatgccttgctagacgatcaaatgcgcttggtagagcagcgaatcgccgagttgcaggcgctgcgcaagcacctgcgtgccatccgcagtacctgtgcgggaggggtatgcgttggcgattgcggtgcacttgaatcgctgcgcagcgccactggggcaagctggccaaccgttcgctga

SEQ ID NO: 535823 - DNA, 1509 bp, Stenotrophomonas maltophilia
atgcgagcggccctgctgtcgttgatgggtgagctggccgagcgagacggcgtgatcgcacgccagggccaagaggcggtcttcaagcaggcgcagatcgacaagctcacgcacgagaacgcactgctcaagcgcatgaagttcgccgcacagtcggagcgcttcagcgccgagcagaagagcctgctcgatgaatcgctggatgaggacctgcaggcggtggccgatgagatcgagcaggccacgccgccagtggcaggccgccaagacaagcaagtccccaaacgcgcacccctgccggccaacctgtcgcggcgcgagatccgccacgagcccgagtccaccacctgcgcctgcggttgccagatgaagcgcatcggcgaggacgtggccgagaagctggactacgcgcccggcgtgttcacggtggagcgccacatccggggcaagtgggcctgtgcccagtgcgagacgattcaccaggtgcctgtcgatcctcacatcatcgacaaaggcatccctaccactgggctactggcgcaagtgctggtggccaagtacgccgaccacctgccgctgtaccgccaggaagcgatcttcggccgcgccggcctagccatcccccgctccacgctggcgcaatgggtgggctcgtgtggcgtgcagttgcagccactggttgacgccatgaggacagagctgctgcagcgccgcgtgctgcatgccgacgagacgccggtgtccatgctcaagccgggcaacggcaaggcgcaccgggcgtacctatgggcctatgccacgggcgccttcgagaacatcaaggcggtcgtctacgacttctgcgaatcgcgctcgggcgaacacgcccggcgcttcctgggcgactggagaggcagcctcacctgtgacgacttcagcggctacaaggccttgatcgcaagtggtgtgaccgaggtcggctgcctggcgcacgcgcggcgcaagttcttcgatttgcacgcggcgaaccaaagccagatcgccgaggtcgcgctgcagcagttcgcgcgggtctacgagatcgagcgtgaggtcaaggagattgcgaccgatcagcgccaaaccatccggcaacaacaaacgaagccgctgcttgatgccttgcaccagtggatggtgctgcaacgccagaaggtgccggaaggctcggcaagcgccaaagcgctggactacagcttgcggcgctgggaggctttgacccggttcgtcgatgacggacagctgcccgtggacaacaactggatcgagaaccagattcggccgattgccattggccgcagcaactggctctttgcgggcagcctacgagctggtcagagggcagcagccgtcatgacgctcatccagtcagcacgactcaatgggcatgatccctatgcgtatctcaaggacgttttggctcgcttgccgacgcaacgggttagcctggttcacgagttgctaccgcatcgttggttcgcaccgagctga

SEQ ID NO: 535824 - DNA, 363 bp, Stenotrophomonas maltophilia
atgtgcagcgtggctgcgcgactggctccgatgatccgcattgatgcgctgtggctctccaccgagccgctggacatgcgagcaggcaccgagacggcgctcgcccgggtagtggctgtctttggcgcagcgcgcccacaccacgcctatctgttcgccaatcgacgagccaaccgcatgaaggtgctggtgcacgacggcatcggtgtctggctggcggcccggcgcctgaatagcggcaagttcgtctggccgcgcgatgccgccaccaccgccacactcagccgaacgcagttcgatgcgctcgtgctgggcctgccctggaagaacgtcggcgaggctggagtcatcactgtactttga

SEQ ID NO: 535825 - DNA, 321 bp, Stenotrophomonas maltophilia
atggctcgatcgaaagcagtggtgggcaacgagcacctgtccgatgtcggagttgatcctgacttggaggcggaacccggtaggttggcatcggagttgcttcagatccgggctcgtctgcacacagctaaggtggtcgggcagttcgacgagttcctgggtgcgttttggaaagcgctggatgcagagacggacagtcaagccatcggtagatgggaggtggcgaacgaaacgtacaggtttctcgcagaggccatcggaagcaccatcaaggcattggaagatgagaatcagcagctgggtgagccgctagcgcgctga

SEQ ID NO: 535826 - DNA, 519 bp, Stenotrophomonas maltophilia
atggttgagactgtggcgggtctgacggacctccaaatcaagctattcacagcggtcggacagatcttggtcgctggagcagttggcgtgattgcttggcggcagtggcgcactgcgaggaacaagcttaaggccgatctttttgatcgacggttcaagctgttctgcagcatcgaaggtgctttagatactgccctcacccaaggcaaacgccaggcgggcattgaggagctcgagtacttggcgcgcgaagtgaaatgggtgttcggaaagggactcgagaagaaattccgatcacgcatacttgctccgttcacgaaactcattggcctcaatgacgagctgaaagaactgcgcgaactcatggccgcggcacatgccgaagatactgggcgaccggacaacacacgcaaggaaaaaatcctgctcggccgcatgaaggatgccaggaagaaaatgttgcagacaccaaacgagctgcgagtgctcttcgacaagcagatgacgctaaagcactag

SEQ ID NO: 535827 - DNA, 708 bp, Stenotrophomonas maltophilia
atgcgtaagcagcgcaataacctcagccctggcttcttcgaaaagtgtgcgcgcctaggaaatttcacctttgcctgctcggagatcgaatttagagaaatcgcgaggatccgccccagagaacgttcggacattcgcggccgtttccatgcaataggcagagaactgttcaacgtattccttgagatttttgacatgctccatcgagcctgcaaacacctttatctctgcgggaaaatgattggtgcgagtgtgcatcttcacctgcgaaagcaacaacttgcaggttgcgttcaatgtgcggctgtacccaatcaagattgcgagatcatttccaattttttcgggcaagtagtgcagcctatcttccgatttttcggtgccgggcaaaagcgattgctcccccaacaggaatgtgcgctccaagaaatcgacctccctctcagtctttggggcacctcgattcaaagcatgcgtgcaatgctgatgcaggatgtacagctgcgccggcaattccgagacctcgtgaaccagtactcgggcaacgattcgagcatttccgtctctcgttccgacgatttccagatgctgctgcttggcgattcttgtcgcctcggcagcaatcgacgtcgctttacgagacgtccgataggcaaggactgcaacgactgttgttgccaataccgcaaagacaccaacccacactga

SEQ ID NO: 535828 - DNA, 894 bp, Stenotrophomonas maltophilia
atggccatgaccgctgacttgcgaatgttccccccccctccggctcttcaagccaggtgggcgccgttgtacatcgaaccaatgcacggcagcggcgagcgaattgtcgttgccatcgctgcggtcgacgacagaggcgccttctgcgtgcacgctaccctgacggaacgggttctgcggtgtatgtatggcgatcaggcagaaacgcttaatgggctgattgacctgtccttggacgtccttcaatcatatctggcgacaggaggagcgctggaaagctggctgccgcccttccgttcttgccacttgggaaagtgtcgcagcgcgatgggttcagatttggagcaggtcgctcgtagtggagctgtactcacttcgagcctggctgcaaagctggctgattacagcgttgaacagagctcggaaacggctggaaccggacttgatgtagagaggtgggttcagcagattcgcgaacgcgtctgtgcccaacgtccgcagctcgacgcgcgcttcaatggtgagattctcgcgcgcacaggcgcatctcccaccaggattggctacttgggagcaaatattgctgccaacttcgacatgctgatccccggttctaacttgtccaacaggcgtttccggtccaagtctcgattgttggacctgcagattcttaaagatcaagtcgacagtagcctgttaccacgggccagctatgagcttttgctttggattccagagaaggactcgccgggattttcgcagagacaactcgatgccgcgcacggagctctgtctgaactgcaagcgtttgctgataatcactctttgacggtgcagtcctaccatcgagctgacgaagcggcgcagcgaattctcgcggcagaaatcaattag

SEQ ID NO: 535829 - DNA, 753 bp, Stenotrophomonas maltophilia
atggtgcatctcgggacgttagtgaattctcttggttcagccgggaccggcatcaacgatgccttcagaggggtggtccgtacctcctcgggtgacgtcacagcttatgtgaagaagctagccacctctcgagaggtcttggtagagatcgcctgtgcagtgctggcgcgccaactcgatcttccagtgcctcagccattgttggtccacatcccgaagcacatgggtggcccagaattggcctatggcagcgtgacggctggccacggcgatctctctgccttcgtcgagactggacaattgcaagcaatctgggatcagctgcgggcttggccaagtttggtcaaggcagcctgctttgatgagtggatcgcaaactgcgatcgccaccagaggaatatcctatacgacggacgtggcgagttctggctcattgatcatgggctggccgtgcacgcccatctgccggtggacgcgttggcccccagaaaccaactgttcgaggtcgccgtacttggtaaggcagagaacgaactgcttcgaatgcgtccggtcgctctgggcgtgatggaagcctttaaggagaagtccacttctcgagaaggcctcgaactgccgactggcatttggcaagacgaggagtcggattcggtgctcaactggcttacctctaggcagccgcacctgatgcgactggctagcgagagaatccctgcgatgcagagcgagatgttcgatggccatgaccgctga

SEQ ID NO: 535830 - DNA, 1686 bp, Stenotrophomonas maltophilia
atggctgactggatcgccctggatcggctgctgatcacggcgcagcccggccgcgacatcggtgtctgcgatggcattgccgtcgaccacgtcggcttccgcctgcgcgtgctggcctggcgtgacgctttcagcactgccgaaggccgcgactgggcgctctacttcgatgacaccgtggccttcgctgcagcgttgttcggtgcctggcatgccggcaagcgggtgttcctggccgccgacaacctgcccgcgacattgcaggcgctgcagccgcaggtgagtggttttgcaggtgacctgtcggccgattaccagccgttgcaggcgaccgccgtcgccgacgatgcgccgctggagccgttggacgagcgcgcctgcgaactgtgcgtgttcacctccggcagcaccggccagcccagcgcgatcagcaagcggctggaccagctggcgcgcgaggtcgatgccctgcaggccgcgttcggcgctcagctcgatggcgcccaggtgcatggcaccgtctcccaccagcacatctatggcctgctgttccgcgtgctgtggccgctggcggccggtcgtgcgatccagccccggcgcttcttccacgaagacctggtgggcgcgcttgccggaaccgatacggtgctggtcgccaccccggcccatctcaagcgcctgcccgagcagctcgactgggccagcctgcacggtcgcctgcgcgcggtgttctcttccggcggcccgctgccggaggacgcagcgcgccaggtccgccagtggttgggcgtggcgcctaccgaggtttatggcagcagtgaaaccggcggtatcgcctggcggcgctgggacaccgatgcgccgccgtggcagccgttgccgggcgtgcagtggcggatcgaggaggactgcctcgcagtcgcttcgccgcacctggagacgtcggactggtggcgcactcaggatcgcgtgcaagcactggccgagggccgcttccgcctgctgggccgcgccgaccgcatcgtcaagatcgaagaacggcgcgtttcgctggacgcactggagcgcgccctgcgcgaagatcccgaggtcgaggacgcgcgcgtacttgtgcttcagggccagcgcgagcagctggcggccgtagtggtgccggccgatccggcgctggcacgtgccggcgacagcgcacggcgcgcgctggggcagcgattgggcacgcggctggcgcagggccatgacgcggtcacccggccgcgccgctggcgcctggtcgaatcgctgccgatcaatgcccagggcaaggtcacccaagcggcgctggtcgcgctgttccagccgctgctgccggtgccggtctgggactgtcgcgaagaggccgcggccaccctgcggatgatgctggaccctgcgctgcgcgcgttccagggccatttcccgcaggcggcgatcctgcccggcgtggcccagctggactgggcggtgcgcttcggtcggcaggccttcgtgctgccgaccggtttccagcgcatggatgcagtgaagttccagcgcgtggcccgccccggcgacgagctgaccctgcaactgcagtgggacgccgaacgcggcgtgctgaccttccgctacacctccgtgcatggcgtgcacgccagcggcagggtggtcttcgccgatgcgcattga

SEQ ID NO: 535831 - DNA, 1428 bp, Stenotrophomonas maltophilia
atgcactggcttgcacgcgtgttcgcttccgcgatcattcgacgtgttgctgtgcttgtcgtcgcagcgattgcaggctggctactttctggaaatgcacatgccgccagttgcgcctcttacgacgatcagtgtactgagggggccgcgcgccaaggcgctacgtcatggtctggtgctcaagctgcctgtatagcgcgtgttggcccgaccggaactgtcggccctaacgttccacggaagaatgtcgaaggcgccgggcgtgggtacttcaccgttagtgcggtctgctacttcaactccagcacacgtgatgtatctccgactgcacctgatcagagtcgttggtattacgccaaaggctgtgacgcagagccgtcttacacagggcaagggccgtggtcatcttttagtggtggcgcccgaactggcagctacggctgtcgcaacggctgtgacggtcgctggtttcagaatgcggacaacacttacacgtggcagggcatgccgggaggtgaaacgtgccctgatgatcagaagaaggcgtgtgaggttctgcccgggcattactggaatgcggtgctgagggtttgcgagccaccaaacggtgactgccccaatggcgcaaagccaaactcgctgggtcagtgcgcacccgaaccctgcccggagggcatggggcagcagcccgatggcacgtgcaagaagaaagagaatgaatgtcccgcagggcagattcgttcacctgatggcaagtgccttcctggcgacggccagtgcgctaagggcgaagttcggggccaggacggaacgtgcaagaaggacgccgacaacgacggtcagccagacccggtaaccgacgaatcgttcagcggtggcgatgactgcaatgcgccgccttcgtgtagtggctcccccatcatgtgcggtcaggctcgcatccaatggcgcatcgactgtaacacccggaagaaccgaaatatcgcgggtggcacctgtgcctccatgccgatctgcacaggcgagaaatgcgatgccatggagtactccgcgctgctcatgcaatggcggtctgcttgcgcgttggagaagctggcgcagggctctggcaatggggggggcggggagaatgctgatgtcaaggcgattcgtgacgccctgaccggcaccggcggtgcagtgacaacggcgcccgatcggcctagctccgacgtatgggccccgcgcagcggcacgccggtgaagcctgatactggcggatacggctgggggcgtacttgcccgcagccgcccagcttcgaagtgttcggaaatgtcatccagatcgacacagcaccgctctgcaactggctgattctcggtggctacttcgtgatggggctcgccgccctggcttcgcttcgcatcatcgcatctagggacgcttga

SEQ ID NO: 535832 - DNA, 834 bp, Stenotrophomonas maltophilia
atggccctcaatgccaccgtgcgccagttcaatggcgcaccgcagctggagcctgcacagaccatggtcgccatcaacaaggtgaccatgtcctttggcgaattcaccgccgttcgtgatgtcgacatccaggtgggtgacggcgagttccttgccatcgtcggcccgaccggctgcggcaagagcaccatcctcaattccgtggcgggtctgctgaagccgtcttccgggcaggtcagcatcgacggccgcgccgtcagcggtgtgcaggagtcggtcggctacctgttccagcaggatgcgctgctgccgtggaagacggcttaccagaatgttgaactcggcctgcgcttccgcggcgtgcccgaagccgaacgcaaggccaaggccaacgcgtggctggccaaggtcggcctggccggtttcgagcatcgctacccccaccagctgtccggtgggcagcgcaagcgtgtgcagatggcgcaggcgctgatcgtcgagccgaaggtgatcctgatggatgaaccgttctcggcgctggacatccatacccggcacctgatgcagaacgagctgctgcgtctttggcaggaagaccggcgctcggtgatcctgatcacccacgatctggaagaagcgatcgccctgggggatcgcgtggtggtgctgtcctccggcccagccagccgcgtggtgcgcagcttcgacgtggatctggaacgtccgcgcaacgtggccgagatcaagctggatgaccgtttcaccgacctgtaccgcgacatctgggcctgcctgcgcggcgaagtggagaagagctatgcacgccaagactga

SEQ ID NO: 535833 - DNA, 348 bp, Stenotrophomonas maltophilia
atgggaaagccgggcatctggtattggctatggatgatcaccctcctgatgggaggtctgttggccctggcgacgctggtactgtggacccggctgcctggcgacgttcgcaatctggccatggcgctgacctgggggctgtgggcactggccaccgtctgcttctttctgggcggcatcgtcgctggctttacgatatggggcgtcaaccacggcaggaaagtctggcgtgcggacaggccgcgagttttctggctctgccacatcaccacgacgatgctgtgcgtcagctgcctgggcctgctgatcgtaccgatgatgattgcctggcagggcgtggcgtggtga

SEQ ID NO: 535834 - DNA, 2115 bp, Stenotrophomonas maltophilia
atgaatcgcgaccagctcaaaaaactcgaaaatgacctgtggtcagcagccgacaagctccgcgccaactccgatctcaaggccagcgagtacagcaccccagtgctcggtctgatcttcctgaaattcgcggacaacaagtaccggcagcaccaagcggcaatcgagcaggaattcaagaagctccagggcacgcgccgtgagcgtaccttggaagagattgccatcgagaagtgtggcttctacctcgatgcgaaggcccgctacgactacctgctgaacctgcccgagaaggaaaacatcgccaaggccatccgcgccgcgatggccagcatcgagaacaccaagcccgagctgctgggcgtgttgccgcaggaggagtacgaccgcttcacccgcagccccaagaaccagcacattcccaaggacttgctcaagctgttctccgacatcccggtggacgctaccggcgacgtgttcggccagatctacgagtacttcctcgcgaactttgcgctcagcgagggccagggcggcggcgagttcttcacgccgcgctccgtcgtcaagctgatgaccgagatcatcgagccccatggcggcaaagtcttcgaccccgcctgcggctccggcggcatgtttgtgcagtcggcggatttcatcctccagcaccaggccgacaaggcggcagacctggacgtgttcgtctgcggcaccgagaagacgctggaaaccgtcaagctcgccaagatgaaccttgccgtgaacaacctgcgcggcgacatcaagcaggccaacacctactacgaggaccccttcaacgccttcggcgccttcgactacgtgatggccaacccgccgttcaacgtggacgacgtgacgctggacgccgtggagaaagaccgccgcttcaacacctacggcgtgccccgcaacaagaccaaggcaaaggcggcgggcgggaaagacggcaaggaaaaagccgtcgagaccgtgcccaacggcaactacctctggatcaacctcttcgccacgtcgctcaagcccggcggccgcgccgcgctggtgatggccaactcggcgagcgatgcccgccactccgaggcagacatccgccgcacgctcatcgaacagaaccttatctacggcatgctcacgctgccgtccaacctgttctacaccgtcacgctgcccgccacgctgtggttcttcgacaagggcaagaccgatgacaagttgctgttcatcgacgcccgcaacatcttcacccaagtggaccgcgcccaccgtgagctgagcgacgagcagatccagaacatcgccctcatcccccgcctgcacaagggccgccgccaggagttcgtggaccaggtggaccgttacctgcacctgggcatggcccagctcaaggaagccgccgagcacctgcccgccttgagcgaccgtctgctggccgtgctggccgaagaagcggccgacgcccaaaccagtcaggccgcgcgcgacgctatcgcggcgctgcaaggccagtggggcctactcgccgcgctggcgcaggcgcaagatcagcacgagcgcacccgcggccagaagcacagtgtggacgaccgcaacacggctcagcacctgctgcgcgcccagttcaagcccttcttcaccggcctgcacgcagcggggaaggcgctggacaaagccatccgcgagatggacaagcgcaaggccgaggccgccaaggcggacggcaaacgcgccaccgccaaccgccagaccaagggcgtgaaggcagcggtgcaggccctgcacgacgagctcaagactgccgagctgtactaccagcatgtgagctggctgcaggaacgcttccccaaagccgcctacgaagacgtcaccggcctgtgcaagctcgccagccgcgaggagattgccgagcaggattggtctttgaacccggggcggtatgttggtgtggtgattgaggaagatgggaagacggaggaggagttcctggccgctattgcagaacagcacgccgaactggaatcactcgcagccgatgcgcatgcgcttgaggcgacgttgaccaagaaccttgctgcgatcctcgggggccactga

SEQ ID NO: 535835 - DNA, 1326 bp, Stenotrophomonas maltophilia
atggacaagagagaagccatcggtatacgggacgcaagctttgagctcacgaccgtaggtgatctgattaagcgaggcgtcctggagcgccctatcgacggtaaccacggagaaattcatccgaagtcagcggacttcgtgtccgagggggtgcccttcgtgatggcaagcgatctcaagaacggtcgcgttgagtatggccagtgcgctttcatcacggaacgccaggcggagagtctgcgcaaaggtttcgcgaagaacggcgacgtcttgttgacacacaaggccacaattggtgagaccgccatcgtggcctacgacaagcatccgtacatcatgctcacgccccaggtgacctactaccgcgtcaaggataaagcggcgctcagcaaccggtacctgaaggcatacttcgatagctcattgttccagcagacgctgcaaatgctggccagttctggctcgactcgtgcctacctcggcatcactgagcagcatcgactgccagtcatcctccctccgcacgagaagcaggaaaagatcgctgcgattctgggtacgcttgatgacctgatcgccaacaaccagcgccgcatcgccttgctggagtccatggccgaagagatctacagcgagtggtttgtgcggatgaggtttcctggctatgaaacggctgcacacgagcgaggaatgcctttgggctggcaggcatcaacagccgccgcgatggtgcaggttcaaggtggtggcacaccaagcaccgaggtcagccagtactggggtggtgagatcctcttcttctctccgaaggattcgcatgatggtgcttattgcttgcagaccgagcagagcatcactgaactgggtttggagaactgcgcatccaggctcttccccaaggacacgatcttcatcaccgcacggggcacggtcggcaacttggtgttggccggcgagccgatggccatgaaccaatcctgctacgcgctcgtcccgaagatcgacaagaagccgtacttcgtgtttgccgggctgaggtgcgcagtggatgtgatcaaaggagtctccaactctggcgtcttcgataacgtggtcatggacaccttcaagatcattccgctggtcaaccccggcgacgcccttcgtgacaggtacaacgaagtagctgggcccatctatgagcagtcgctcatgctgcgccgggccaacgcccacctccacgctacccgagacgccctgctcccccgcctgatctccggcaaactccgcgtcgaggccttagacatccagttcccgcccagcatgcaacagcagcctgccgcatag

SEQ ID NO: 535836 - DNA, 3261 bp, Stenotrophomonas maltophilia
gtggccgccgcgaaaaatttcatcagcgaagacgatatcgagcaggccctgctgcagcggctgcagcatctgtgcggcttcgatgcgctgaactgctacacagcccagcccgacgagctgaacgacggctcgggccgcgcggacaagcgcgaggtgatcctggccgaccggctgcgcgccgcgctggagcggctgaacccgcaggctccggcccatgcggtggaccaggctctggcccaactgctgcaaccgcgcacggcaatgagcctggtcgcggccaaccgggagatggacggattgatacgcgacggcgtgccggtgacctacaagcccgaggccgggccgcaggtcgggcagaccgtgaccgagcggctgaaggtcatcgacttcgacgcgcatgatccgcgcaccggccgcaaccactatctggcggtgagccagctctgggtgcgcggcgaacatggctaccgccggcccgacttgctgctgtacgtgaacggcctgccgttggtgttcatcgagctgaagaacagcaacgtgaagctgcgcgcagccttcgacgacaacctgactacctacaaggccgagattccgcagctcttcaccgccaatgcgttgtgcctgctgagcaatggcatcgagacccggctgggcagcatcaccgcgcagtgggagcacttcttcacctggctgcgggtggatgacgagaaggaacagctggaccgccctgctattgccgcgcagggcttgagcgtggagcgcgcggtgttgggcctgctgacgcccgagcggctgctggactatgtggagaacttctgcgtgttctaccgcgagacgcagaaggtcatcgcgcagaaccaccagttcatcggcgtgaacaacgccttcgagcagttcaggcaccggcgtgagcttggcggcaagctgggcgtgttctggcacactcagggctcgggcaagagcttctcgatggtgttctacacgcgcaagatcttccgcaagctcaccggcaacttcaccttcgtagtggtgacggaccgggacgacctagacggacagatctaccgcaacttcctgcacaccggtgtggtggcgccgaaggacgacgtgcgacccaagggcagcgcgcaactgcgcgagatgctgggcaagaacaagcgcgtggtgttcacgctgatccagaagttccggttcgagaagggcaaggactacccgctgctgtccgaccgcgacgacatcgtcgtcatcgtggacgaggcgcaccgtacgcagtacgcgggcctggccgagaacatgcgcgtcggcctgccacgcgccaacttcctggccttcaccggcacaccactgttgggccaggagcgcaagaccaacgcctggttcggcgactacgtgtccgagtacaacttccagcagagcgtggaagacggcgccacggtgcccttgttctacgagaagcgtgtgccggaggtgctgatccagaacgacgacctgagcgacgagttcgctgcgatcctggaagacgaaaacctcgacggcgaggcgcaggagaagctggagaagcgcttcgcgcaggagatggaggtcgtcaagcgcgaggaccgactggacacgattgcgcgggacatcgtctaccacttcccccgccgcggctatctgggcaagggcatcgtcatctcggtggacaagttcaccgccgtgacgatgttcgacaaggtgcaggctctgtggaaggccgagatcaaggcgctgaacggccgcatcaccgcgacgaccaacgacgtggagcgccagcgcctgaagcagctcaaggcctggatgggcgcggtgcagatggcggtgatcgtcagcgaggaggcgggcgaggaagagaagttcgcgaagaagggactggacctcaagccgcaccgccagcgaatgaacgcactggatgagcacggccacgacatcgagttcaactttaaggacccggagcacccgctgcaactggtgttcgtctgcgcgatgtggctgacaggcttcgacgcgccgacggtgagcacgctgtacctcgacaagcccatgcggggccacacgctgatgcagaccatcgcgcgggccaaccgggtgagcggccacgagatcctgggcgtggccaagcgtcacggcgagatcgtggactactacaacgtcttccgccgcatgaagaaggcgctaaaggactacgccgccggccccgaggacgacgagctgccggtgcgggacaagagtcatctgttcacgctgctggacgaggccatggagcagggcctggcctactgccaaagccaaggtgtgccgctgcacgaggcgctggaccgcgacgacgtgttcaccaagctgggccagttcaacggctttgccgacacgctgctggccagcgacgagcagcgcaagtccttcaacgtctacgagaacacgatctcctcgctgtacgaggcctgcaagcctgaggtgctgggccgcaagctgggccgcgtggtgtcggccttccagtacctgcgcggggtgatggacagcatcgtcgagcaggtcgacatcgacagcgcggtgcagcgcatcgaggcgctgctggacgccagcgtggtggtggacaaggccgaggccttttccgccaaggagttcgaggcgcagtacaagatcgtgcagcgcggcaaggcctgggacctcagcaaggtgaacgttgagaagctgcgcgaggagttccagcaggcgcctttcaagaacatccagatcgccgacctgcaggcctttctgcagcgaaagctggccgagatgctggcgcagaacagcacgcgggtgggcttcatccagcggctgcagaatgtgatcgacgcctacaactccggcgccacgtccaccgagaactactacgacgagctgaccgcctatgccgaggagctgaaggaagaggccgagcgacacatccgcgaaggcctgaccgaggacgagttggagctgttcgatctgctgaataaggagtcactgacgcaggaagagacccagcgcgtgaagctggccgccaagcacctgctgaagcgcctggtggaggagcagcccaaggtgctgattcagaactggcaccagagcgcgcagacgcagaagcaggtgcgcgcggaaatcgaacgcgtgcttgatgcggacttgccggaaagctatgaccgtaccaccttcaagcagaagtgcgacaacgtctatgaccttgccgttgagtacgcgctgcgcggcaggaagtgggcagcatga

SEQ ID NO: 535837 - DNA, 363 bp, Stenotrophomonas maltophilia
atgaaatggatgggtgtggcactcctcggtgttgccctgatggtcagcacgggctgcaaggacaagcagagcccgctcgtcactggggctgaggatgcggtcaagcagatgttgaaagatccgggatctgtggagttccggaacgtaagtgtcattcaactgtccactcccgaaggagatgcccccatcgtctgcggggagttcaacgcgcgaaacagccttggtggctacgttggctttgaaccgtttgcctggcacccggatggcaagctgatcaccaaggcgctattccccacggcggatatgagcatcctgtataagggcattgaaacgctctgcagcggtaagctctacgaaccgtag

SEQ ID NO: 535838 - DNA, 5643 bp, Stenotrophomonas maltophilia
atgaaccggaaagtattgctcgttgaaatcggtggccagggcctgcctgcagtcacgcctgtgacccggcagccctccaactgggtggcgtcggccaagccagctgttgtggttcctccggccgaaggcgtggagaccaagccggcagcggatagcgtgaccattacctggaacgcttcgccgctggctggtgctgtctatgtcctctggcgcgcggccgatgcaggcggaaagccgggcgaatggaagtacgtcaccaaaacctcagacacgcgctacacctacaccgaggccagcggtgttgtgagctggtggaaggttactgtccaggtcaacggcgtgtcgtctgcagactccacgcccaaggctcaggcccccgtggtgccgccgactacggcggagctggtccagctgcagggcaaggtggaccagggcctgcgtgacctggcactggcagatgccgccgaggcacagcagcgtttggcagacttccaggctgcgcaggcacagatcctggcagagagtcagaagagtgcggccgcagtgggcgaagtggccaagcgtgccgaggatctggccgccaacctggccaacgaagagcgcgcccgtattcaaagcgtgctgaacgaaaaaaccgagcgcaccgctgacatcagcacggtcaacacgaaaatccagaacggcctggattcaatggcgcgctctctggccgaggtcgccgcaggcagcggcacgcagttcgactctgccggcatctggcatttcaacgcaggactggaaggctggacgggtgtgtacggcgccccaactatcgccgacggcatgctgcggccgatcaacaccaccaacaactccggcatccagtccccggcgccgctcaacatcgacggcgccgcctatcgcttcatcaagctgcgcatgcgcaaggtgggcaatcccgcctggatggggttgattcgctggatcactgaggccgaccgagagtggaacgaagcgaagtcgctttccatcccggtgccggcattcgacgtcaacggcatcgccgtcctcgacgttgatcgtctgccctggaacggcccctcaccactgcgtgccattcgcctggcactgacgggtgcgcagaccgccagcgcctacatcgaatacgactggattgccgtgggccgcccgtcgcctggcgcatccgtcgccatggtccagcaggagagcgacgcgcgaacggccgccttggcggctgaggctggccagcgcaacacactggccgtgcaaatgcgcggcgactaccccggcaacgatccggcgaagctaacgggcggcctggcctacaacgaaatgagggcgcgtgtcggcgccgacgaagcgctcagccagcgccagtccgcagtggaggtccgtctgcctgcaggaacaggtgcgctcgcgtctgaggccaaggtcaacacggtcgagcaggcaagcctcacccgcgacgaagccatcggccaacgtattgaccaggtcaatgcaacgttgcccgcgatgatttcccagggcgccaacatgatccttaacggtggctggaacgccggcaaggacgtgggatggacgtatcagggaggctcgcagttggccggtgtttcgtggccggccgcagagggacgaagcggcagcgcggcactgcgcatcgatggcacgggctccgcccgtacaactgttgcgcttgcgaacgcaggcatgaccatggccaccgggcctgcgaagaagtaccgcgtaagttgctggtacaagaccagcgccacgttcaacggcaccgcaggcgactccaagctcaggcttgctgaccaagcagccgcctggcttgcagatcgaccgttcctcgcgaacaaaaccgattggacgtacctggagttcatctataccgtccctgccgccaacgttctaggcctgcgcctctcagtggcatgcaataacaccgcaggtacgctatgggtggacgatgtcgcagttgaagaggtgaccgagatcctggcagttgccgatggactcagctcgctgagcggaaccgtcactcagcaggcgggcctcatcaacgcgcagtcgggcctcatcagtgccctgcgcaccgacgtggacggcaaggctaccaacggcgccctccaggctctgcagtcccaggtcacgctccaaggcggcactatcacgagccttggcacagccatcaccaacgttactgcgtcgctggcaaatattggtggcgacaatctgctgccgaatagcggatttgaaaccagcaatgccgaaaacagcactctgccggattggttcgcgtccaacagcatcgcgcagacggtgagctatggcgcagcctatgcagtgaccggatctgcgcgggccatccagatcggttcgaccaacgccctcacggcttcgggtcagtacatcggcgtggaagtggcgactgccaacaggccgaagcctgtaccaggggcaaagtacacgctgtcggcgtgggcatgccgaatgactgccaacgtgggccggattcagttgttggtgcagtggttggacaacgccaacgcaggaatcggaccggcgcagtacgctccgattgtcgacatgaccgacgtaatgactcgttacaccgggacgttcaccgcgcctgccaatgctgtcagcgtgcgcatcttcatccgcgcggccggcactgcggcagggcaatggctggctattgcgattgacaacgtgatgttccagcagggcgagatagcaaccaactggatgcccagcgccactgagattgcagcccaaacaaccgccaatgcgaaggctaacagtgccctggacgcgcgcgtcaccaatgccgagggacagttgctgtcccaaggaaccgcgctgactgccgttcgtgccggcattggtaacgccacggtctacgagataaccgccaacgcaatcatcaccagtcagcccactggaggccctcgctcgtccggaacgcgaaatgcagcgggcggaaccatgggcggtgccggacgcggcctcaatgtccaggtggtcaacgccgacagcactttggggacccggcaaacttttgatacctacggcaacggcgcatcggcatgcgccagcttcaacgactggtacgacaacgccctggctgagaatcagtatttcattctattcaccagcgatcacacagggccgctgagcaacggcgtgggccctgacatcgcgggagccagggaccgtctcgttgattctggcgcctcccgtcgcaacgttgaagccctgaccggaacacgtatgttcgttctggtcgggcgcaagcgcgctggcgagggtgctgcaatgcagcggctgtcgcccccggtctccaccgggcgtgccgaccagtgggttgagctcatcgtggaattcgtcaacgggcgcccgcagggcagcctggacgtatccgcgctggagcgggccacccaggcaaacgcggctgcaacctccagcttggaggcgcgcaccctggcgaatgagaatagcgtcgtttcgctgggtcagtcgctcaccagcgtcaatgccaagatcgatagtatcggcggcgacaatctgctgccgaacagcagctatgaagcctccccaagcgacacgtcagatcccactggctggcagcgcgaagggaacatggcgaacgttgtgctcaagtacattccatcacctttgtccggtggtggtcgcgcgatccgcctggaggcgaatgccacggcaatcggtcagtacctcggcctcgctacgcgcaacgacaatgggtgggttccagttcgtccccggacccagtacgttctcagcagctacgtgcgcgccactgcgggaacagggctgcgcatgtacgtccagtggcgcaacgccgcaggtgtcatcaaggcaacgagcacgatgcccaacgtcgttgccactgctcagtggcagcgtctggtgttccaagccgataccaccgttgacgatgtggtggaggctcggctgttcgtaggccgaatgcacgcgacggccgtccagggcgttgccattgagctggataacgcgctgttccaggaaggcaccgcagcaacgggctgggtgcccagtggcaaggaaacagcagcggcggcagcggcaaatgctgcggcgacggctggccttacttcgaccgtgacccagcagggacagcagctgaccgcgctgggccagtccgtcactggggtccaagccgagatagcaggcaaggccagttcatcggccgtccagacgctggaggcgaaggtcaagaaccagaatggcgccggcaaccttcttgggaacactcagttcactggtgggcctggcacggtgggctggccgaacatgtggtcgcccgatggggcaactggcacacagaagtatttcgctgcgggtgcagggatttccggcggcgttgaccctggcgtcccctacggaatgagggcgctcatcgtagcgggcaccaccgccgccagtggcacggtgttcgtttggccagcgagcgatgcccccatcgaggcgggaaagacctacgcgctttccgtctacgcatcggggcatcgtgcgcggctcattctcgaattcctggatgccaacggcgtccaggttggctccgtgggctcacctgccaccgacttggccggtggtgggaataccatctctctgtatagccgcctttgggtgaaggcggttgctccggctagcgcagtaagggctcgcagcattctcgtaagccatcacctcagcaccgctcattggttcgtccgctggctccggcccatgctatcgatggtggacaaggatgcgactgagccaccggagtggtccgcaggcggcgcggagagcagtgccaggtttggcatcgcgctcgatgtggacggcaacatggccggcttggaaatggaggcgaacggtgaccgcagcgagatgcgcattctgtccaagatcctgcgcatcatcagccccggcgcgccggacggcatggagctgcaggacgggtacctgcgcgtgtggcgtggcaacgtccagcgcatcatcggcaacggcttcgggcccgatggattgattgactactttggtccgaacgtcggcgcagccggtgcgaccaagcgaaacgcaaccgtgtggatggacgtgaatggtggcgcgtactggggcggcgccattgcggcaggcatccgccgtaatgcggcacagtcaacaaccacgcagaccattggcgtctctatcgtcgttggcccgttcagcaccagcggccggaacaagaacgtcgttgtcagctatcagcgaagagtagttcgaaccaatagccgaatggaccgtcagggcttcgtcgcaggcggaaacaggaacgcctgtgcggtgaatgtctacaggaagctgggcaacaacgcagagcagttctggacgagttttgaagccagtggcggcgtgtcgattacgaacgagtttgatggccctgatatggcgatttcgttctggtctggatcggtgacgttgaacgatagcgaaggcacgcaagatcgcacctatcgtgcagagatcgttgggttcagcgaacaggacgtgagccatcagtctggaagtttcaccggcctggacattaccgccagcctttccatcgtctccattgaagagtga

SEQ ID NO: 535839 - DNA, 510 bp, Stenotrophomonas maltophilia
atgctgcttccttggccgcaacgtgtcgcgcgcttcctgctgctggtgctgcctgcactgttgttcaccaccggcctgctggcagccgagcgcccagcgcaggcgctggccgagtgggaagcgcgtggccgtgccgacggcctggcccgacctgacacggtctgccaggacttcctgcaggcaatgggccggaaaccagaagggctggagtacattgggtgcagtcaggacgatgcgtcctacatcaagccgatggaagcccgctaccgcgtttcaggcgcccaggcgcagcaggtggaagcctatctgcgcacgacattcggcatgcctgcattgcgctatgtctgttgcggctggagcaatggcgcgccgcactactggcgcgaaggaccggacgcggtgaggtatcagatcggcatgggcgtggaatcgctgccgtacgagcgcggtgaatggcatcgcatcgaggcattcaacgtcacggttgaagtagtgcggcagagtccctag

SEQ ID NO: 535840 - DNA, 1176 bp, Stenotrophomonas maltophilia
gtgaagtgggaagatgcaaccgatcttgacaacggaggagtcaaaattccagcaaattggctctatctctattactacgaagcacttaatgttctatttaggttcgaaaatgcgcttcggatattcgcctacataatcctaaagaaagagctgggagaaaagtgggactccgcagccattgcgtcaggcggaactattcgaagcgaaaccaataagcgcagaacacaggccagagatcacggctaccttggctatgaggtcacatctccaatgctatttctgaatagcggagagctaactcaaataataaccgctgacgcatactggaagtacttctccccatacttcaaagcatcaaaaacaataatacagaataaattaaatgaaatcggcaccgtccgaaattcactcgctcattttcgaccactaaagcaagacgatctagatctcgttaagcaaaacactcgccatgtactcctcggaatagacgcatgcctcgccaaaatcacatcaatatccaacgtagtccccacaaacagcgatagcgagtggtacaagagactatccaagatatcaaacgatgtcatccacacaacactcctccaaagccaagatggcgaatggattcgagtacaactatcttatcaatgccccatcctttataaatcacagcatcgctcaagctttctttcattccaactcggcaacttccgcactggcgagctaatcaaaacatactccgagataagaaaccgctgcatctacgtctcagaaaagccagctcacggacagataacccctgatttcgatctaaagtgcactaaagaggtcagcctcgtattccacagagcatcacttgaatcatcggccgaagccatcgagaatgaattagtaaaggtcgcagaagtctccctaaatgaatcgcttctacttcaacaagatcggcttgccctaggaacgttgataagctcgaaatcagccaatgcttcgtacggaggccaaaccaaccagcagtattggtcagtcaacgtatccagcctaaataccgccacacaagaagtcgaaaacgtagagttttggggacagaggtacaatttcaacaacgaattcgttactgatacacaccactacccgtggatgccatcccccgtatccttggacgacttccctttctaa

SEQ ID NO: 535841 - DNA, 759 bp, Stenotrophomonas maltophilia
atgaacctctcagggctcgcctatgagcgtgacatttcctacgctgggcggtcagttcccgcttacagtctgggtccacgctcgccgttggtgatcttcctgcacggcgtgcgcggctccagcggttccggaggctccctctcggccattccattgcgcaacggggtgctcaaccggaatccgggtacgttgctcgcctcggcatccacaatcgagcactacatccagatccggatattcttccgcggcggtgcgatggagagcgtgcctcgctcatttctgggcacggtggaaatgtggccggtaagtaatccggccaatccattccgacattccttcacggtggagctcaccgtccctcccgtcacctgcacgctcgccaatgcgtcccacacccttgacgacgtgctcgccaacgaactcgccgccagcggcagcaacgcgaaggaatccagcttcgacgtcacgatgaactgcccgatggacaacatcgacgtgcagctgtcgctggcagacgccaatggcccaggcagcagcaatggccaactcgcaccggctccaggtaccaccgctggcggtgtacaggtgcagctgctgcgcggtggccagccggtgcagttcggccaggcgtggtcgcacggctggtccagcaagggccagcaggccattccgttcagtgcgcgctatctgcgtacggccgatccgctggtgcccggcgacgtcaaaggcgaggcggtgctgaccgccgactaccgatga

SEQ ID NO: 535842 - DNA, 864 bp, Stenotrophomonas maltophilia
atgctgaaacccgtcttcatcctgctgctgggagcgccgctcaccgctgttgccgcacaacctgctgcgctttcactggaagataccttcgacgcctatgtgcaggtcatcctccacggcaacgaggcgtccaaggaagcgctacgcaagcgcaaccttctgcttgagatcaacgacggcactgatgtgatcgtcgataccctcgatgtacttcaactgcccaaggccgctttcaacggcactgcaatggagccggtttcccgcgctctggagatgcggcagaagaccctgtcctgcaccatcaccaacatcacccgggagacgatggatgcgatgctgcaggccaacgtggcgtatcgctgtgccttccccgacctctcgggcttcttcgcgacctaccggaacgcgcagaagcgacgcgccgtcgttggtgacgatcctgaagacgccaaggccctcttcgtttccttcgccaacgccctgcgcgacgcgccggatcggtcacatgagggcagcgcggtattcctcaagatgccagacaacggtccttggttgagcagcaacctgccgcaactgggtatgacattgctgcagcaggcactccccttcgacacgtggaatacgcgtatcgaagcggagtccgtacccacggtcaccggcattcccacctgcgacctgatgatggccgcacagctgagcttccatgcccggcaccatccccagagccccttcctgagcaacggcgtgctgcaaagcaatctgctcaagcgtgtggagggaatgagcgacgaggaggcaacgcgcgattgccagatcacccatgagcgcaaccgcgagctgtggaacagggagaaaaccaactga

SEQ ID NO: 535843 - DNA, 417 bp, Stenotrophomonas maltophilia
atgaagaggcaagcaggtttttcgctgatcgagctgatggttgtaattgcagtcattgcaattctgtcgacgatctcgctgatcgcctaccgcgactacaccataagagcgcgggtgtcggagggaattgcattgacatccccattcaggattgccgtagaagagaatgttgttgagaacggtgacttggatgtgcgcgcttgtgcggacctcccgtcgttgcctggtcctacagaaaacgttgcttcccttgcttgccgtggggagggcgtcctgagcatgaaaaccactgaggtggcaggtgatatctccctcgacttcaggccatcggtcaatgatgcaggcatgctggtctggctttgtgagctcaaggtgggtagttctcgccaagtacctagcgtctgtcgtacgccctga

SEQ ID NO: 535844 - DNA, 450 bp, Stenotrophomonas maltophilia
atgggagacggctgggtgctgtggtggagtggacgacagattgcccaggtcacgccggccaaggaccgtgggggggggcgtgtgcacctcgacgcctggaagatgtggcagaccaagggcgagcgcgccgccagcatcgcccagggcaagcgctacgccgaacgatggtgtgcggccaggctttaccacgagttgcgcctgcgtgcggccgtggtccggttgctggccagcacggcgagcgagccgctagaaccgctgcccggcttgccgccaacccgcgagcagcagcaacaggcccggcgcttggccgaggctggggcgaaggagatcgagcgaatcaaggaagcgttggaaccgcgcaagccgccggcagagacgaagccccgcccgagggacgcccgcaaggcgtgggtgagggcagggctgcaagagataagcaggggtgtttga

SEQ ID NO: 535845 - DNA, 273 bp, Stenotrophomonas maltophilia
atgatgatgcacagtttccaaactatcagactcgagttttctcgaatcaacacgctactgatcgaggcagagcagtggcctacagttgcgaagattttccgcgccggcgacgtgcggggaaccgcatcagaagagaaatgcgcagtgcatggcttttctgacgctccgccatcggccagcaaatccggctacgtcaacacgctggtttggttccaggcggcagatgccgaaaacgcccgaaaggcacagcgcctgctggatgatgagccctaa

SEQ ID NO: 535846 - DNA, 798 bp, Stenotrophomonas maltophilia
atgatccgatcacacctgatgccgagcgtttcgttgatgctgctgctggcatgcagcgcctgtgcgcctgccggggagcgcgtcgcgccggcagcgcccaagacccaacccgttcaaccagcgcagttcctgccttctgatcgtggattgcccgcattgccggaagcctctggcagcgcctaccccggcggccgctacgaagcactgccggaaccggccaggcaggtgctggcgaagttgaagtgcagcgtggagggcgccagcaacgtgcaggtgctttccattcccgcgcagggtggccagcaggatttcatggtcactgatcgcagcgggccgcgtttccgctactggatacggtcgttctccggcagtggcggaaccaccgggtatctggtgcagctgcaggactgtccggcaaccaccgcgggcatgcgcgcctacatcgcacagggagcggcaccgctgcaggatgtcaccgcatcgttgctggcgcaggccgagctgcccgacgcggcggcgatggcggcctatcagagcaagggcgcgggtgatctgttcgccttcatcgggcagctggacaaggtgccggtgctgcgttgggcggccgaggccgatcccgaacagccactggccgccgatgcgcgcagcttcgaccatggcaatgccgttcacggcggtttcctgcgctggaaccaggatcacttcgaggtggccaggaccgttcccgcaacgctgtggccctgcgatgaccggccgttgctgccgtgcaagggcgatccgttcgtgatcgggcgctga

SEQ ID NO: 535847 - DNA, 534 bp, Stenotrophomonas maltophilia
atgcagcgctgggagtggaccatcgcgatgatgctgttgcccgcgctgtgcgtggcggcaacaccggcggcgttgccgatggccgatgaaatgcaggccgaccggctggtggaactgagccggcactgggccgcgccatggccgcgcacaccacgactcgccgacctgcatgcggtcattcctgcatcagcaacccgcatcgaaatgcgtggggcgccgcagctcacattgcctgcgatgccgctttcaccgccgctgcgggtcaccgccggggtggtaatgctgtacccggaccatcaacgcgtgcagtccgtgcgcctcgacatcagcggtgcctgcgtaacccgccagcaggtcaatcagcgcttcggccgccccgatcgggtgcttccgcccagtggtcatgcgccggaacaggcattgacgctgagctacaccgaagttgatcgctggatcagcttcctgtttcccggcgtggaccaccgttgtgtctcacaggtggttctcaggccggcggaggcgcttgctccatga

SEQ ID NO: 535848 - DNA, 306 bp, Stenotrophomonas maltophilia
atgaatattccacaaggtaaattcactgtatgtgagtatcgggatttttacgacatcccgcgactaatggtggcaatggatgagttcggtcgagtatgggtgctcgactgcgagttcaatgagaactttgatgattacgaagattactatcgcgtctacctgctaggcccaggtgcgttccccgaagaggctatctcaaatcacttggatggggagcgcggtgctgaagcagtactgatcccaacttcatctgttcaattcgacgtaaccagaagaagttcattcgtattgggggggcttgaatag

SEQ ID NO: 535849 - DNA, 255 bp, Stenotrophomonas maltophilia
atgccaacaagcatggataccccggaggcaatcaagaagacgtacatcatcacgacgcccctcaacacccaccgcccccccctgatggagcgtctgccctttggaagtaagggcaagcactgcaataccgcgcaagcacctaagccaccaatcaaccttgatgattccgactgcagcgagtacttccggccgttcacgctcgattttcagcaacatcctgtgagccgcaaatgcgtttacccacatggcacctag

SEQ ID NO: 535850 - DNA, 198 bp, Stenotrophomonas maltophilia
atgtcgcggaatcccgctaaagcggccgacggcatcgccgatactccctctggatcccgctccagtcacccgccgcaggaccccaggctgcccccgatgggcggtccgcgcagtgtgttccgccgcttccagatgccgatcgcacccgcagcagacgttcttggcagtcgctcgagaggtgccggttggcacctgtag

SEQ ID NO: 535851 - DNA, 645 bp, Stenotrophomonas maltophilia
atggattcgtcaaagcctaatcagcctgtgcccggcgagttctatctgctcatgcctgacacgacccgaaggggaagagggcatggcgttgagatcgagaatgaggacgcactgctgacgcctcccaggctgatcatccgccccgaagaaggcggtttccctcatctggcgcagagaccgcgcctggttctcgatccaaagctgggggatccaccgcaggacctcgaaggaggaatgagtggctactggttggtatcagagcgcctcaagaaggcattcaccgaaatagatcccgttgcctttgagttcgtggagtgtgactacgtgcttccggacggcacagagggcccaacgtactacctgtgcgaggttgctcgcgaactggatgccgtcgacgaggaagcgtcgaagttccgggtcatcgttgatgagggctatccgggcggaaggttctacgaccttcggggcggagcaagcttggcattcaagagggatgtaatcgcggacagtcacgtcttccgcactccatattctggtgaccttgtctactgtgaccgcatattccgagatgccatacgggctgcgggaatcggaagtgacggtgaaacacgcggccttaggttcaaggacgcattcgatatctga

SEQ ID NO: 535852 - DNA, 354 bp, Stenotrophomonas maltophilia
atgaagcctgtgatctatggcactgtgctgctggcggcggtggctgcggcgatcgccagccggcatgtacccaaggctggcttggatctgcggacctttcggaaagtctccgacgctgagtttgctctcatgcgcgaggagaccgttcggcttgtgcgtgggggccgggtgttggacacgcggtacccgggagaaaggtacttcgaggtcagctgtcacggcgtacccatgatgctggtggacaactcgtcgaagcagcttgtgattgtgctgtatgcggatagggaaattgatgtcccctgcgttgtgccagtgctgtcgcattggagtaggcggattttgccggaaccgtag

SEQ ID NO: 535853 - DNA, 546 bp, Stenotrophomonas maltophilia
gtgccgactaagcgccttgcgctgatcggttccctgtccctgcttgcggcgtgttcgccgcaggcagcggacagcgctgccgatgccgcgccgaaagccgcgccggccgaacgggccgtgactgtcgctccgccggtagaggcaccggccgccgtcgaggccactaccgaagccgagcccactaccgacctgccctcgggtgatgaggcgctggacaaggcacgtgcagccgcaggctgcccggttcctgccgacgtgtatgacgtcgacgacgtgcgtatctactgcacgatgccggccgacgtgcaggccttcctcgcgcgcgaaaacacctgccagcacttcgccggcgaagaggcgtacgacgacaagcgccgccgcgaactggaagaggccggcgcgaagtactgcgagggccgcgagaagaacttcaccgatctggtcgcgcgccatcgcagtgactgtgcgatccgcgaagcgctgatcgcgatcaacagccgctatgacctggacttcgagctggacctgaaaccctgcgagggctga

SEQ ID NO: 535854 - DNA, 1179 bp, Stenotrophomonas maltophilia
atgccaggagccgagtatgatgtggatgtcggattctatttcataggtggccgggcagagcctgacagcgcggacttacgcggattgttgcggagttcgctagaagaatttgcaggaatttgcgacaaagtaaagcagctcgatgctccgaaggagcgatgctcgcgggttaggtatgagcgaaagttccacatcgacgtccctgtctatcacaaagcgtcagactcaggagctgttcggttggcgacgctgtcgaacggctgggaaagaagcaacccagcggcgatgcttgattggttccaagaagcgctcgatggtgacgatcttcagaaggcgcgtattcggcgactggttcgatacatgaaggcatgggccgcgctcaagttcacggactctggcgggattccgtcttcacttcttctgacggtgctagtggtcgacgctgcgcagcgtctcgatggagaggatgacgacgacgcgttgcggatcgtcgtcgattcgatttacgagcgacttttggcggacagcgaagtgcgtaatcctgtaggtggtgacagcgacacgaatctgaatcgtctagatgaagacgacttcgacgccttcatggaagagctggcgcgattcaaagactcgtcgtctcgcgctacagattgtgaagatgaagctgaagcggcagttgtctggtgcgaggcatttgaacacctgttcccactcccagaaggcgtggacgggcttgcgctggaggtggctgatacggggcttgcgatccagagtccagttatcaacattgcggtgctagatggggatggccatagcgtactgaggaattacattgggcgcgttccgatcgcacgaattggtgagaagctaaggttcatgatcacaaatcccgaagtcattcccagcaatgccagggtgacttgggtggtgaggaacactggcgcgggcgctcacgaagaaagcgatttgggacacagcggcgttgacgacgggtcccgtgtctggacacgtggcgtggcgtacatcggtcggcacttcatggactgcgaggtgagggtgcacggtcaactgcgttctgtcaccagggtggctgtggatgtaaatcgtgcagcaacccctccgcgccaccccgtaagtaggcccccttacgtgaagctatttgggaggaggcgccgctga

SEQ ID NO: 535855 - DNA, 228 bp, Stenotrophomonas maltophilia
atgccgcgattcggcaatccggtaattcttagtccacggcaattcgagctggccgtcaaaggaatcgtcgacgcggcagccgatggacttttcgactacgaatcgaagcacttggagcgtctagcggcatcagacggagagtacgagatcgatgtcgccgctcgattcaaggcgctcggtgccaactttcttgtgctgattgaatgcaagcatcacaagcgaatttag

SEQ ID NO: 535856 - DNA, 789 bp, Stenotrophomonas maltophilia
atgctttccgagctactggcgcggaaggccttcgatgacgctggatggagcgttagggggcctggtgcatacttcgatagagagatggaaaagtcacgcgaaagcgattttcgcgcgacgagcgtcatcactgttgaagatagtggaaagaactgtgttcactcagagttctgcgctgctgttgaggtaaaaaaatcagagaagccgtgggttgtctttaagcgtcccttggctactcacgatcgcggttgcgcctggaacaatctcatcgcaagaatcaatcttccatgcgaatcgttcaggcttgccccttggctatctgagtattctcttttgaatgtgctcggctgggaaggtgcaggaatacacgagtctttcaagtcgcctgatcagccatcaaagtggtactccgcatttgtctcagcgctaaagtgggcttgccagatgcgagatgagtgtcccgatgcagatggcgttcagcaagatatcagattggagcccgcagagttctatttctttcagccagttgtggtgttggacggccagctgttctctgctgaactggatgaaaattcggagattaaaatcgatgagattgagtttgccgcattccggttttcgtacgactctaaatcttacgaaaagaactcatttagagtcgacattgtgaccgttgaagggcttgaaaaatacataaatcttctaaaaagaaggcatcaacacgttgttgctgggataaagaggctggccaatttagatggttcggctggtgtagcggggtcttcttga

SEQ ID NO: 535857 - DNA, 1803 bp, Stenotrophomonas maltophilia; identical to SEQ ID NO: 495818

SEQ ID NO: 535858 - DNA, 1773 bp, Stenotrophomonas maltophilia; identical to SEQ ID NO: 495819

SEQ ID NO: 535859 - DNA, 516 bp, Stenotrophomonas maltophilia; identical to SEQ ID NO: 495820

SEQ ID NO: 535860 - DNA, 132 bp, Stenotrophomonas maltophilia
atgaatacaggcattccgcacccgtcgctgaacaaggaaaactattttttaacgtgcgtcggattcgattcatgttggggcgactacggtgtgctcgccccgcaaccgggggcccaaaacaagaaacattag

SEQ ID NO: 535861 - DNA, 636 bp, Stenotrophomonas maltophilia; identical to SEQ ID NO: 495821

SEQ ID NO: 535862 - DNA, 1506 bp, Stenotrophomonas maltophilia; identical to SEQ ID NO: 495822

SEQ ID NO: 535863 - DNA, 1500 bp, Stenotrophomonas maltophilia; identical to SEQ ID NO: 495823

SEQ ID NO: 535864 - DNA, 438 bp, Stenotrophomonas maltophilia; identical to SEQ ID NO: 497253

SEQ ID NO: 535865 - DNA, 1653 bp, Stenotrophomonas maltophilia; identical to SEQ ID NO: 497674

SEQ ID NO: 535866 - DNA, 321 bp, Stenotrophomonas maltophilia; identical to SEQ ID NO: 497673

SEQ ID NO: 535867 - DNA, 13683 bp, Stenotrophomonas maltophilia; identical to SEQ ID NO: 497672

SEQ ID NO: 535868 - DNA, 1509 bp, Stenotrophomonas maltophilia; identical to SEQ ID NO: 497671

SEQ ID NO: 535869 - DNA, 1914 bp, Stenotrophomonas maltophilia; identical to SEQ ID NO: 497670

SEQ ID NO: 535870 - DNA, 1200 bp, Stenotrophomonas maltophilia; identical to SEQ ID NO: 497669

SEQ ID NO: 535871 - DNA, 2712 bp, Stenotrophomonas maltophilia; identical to SEQ ID NO: 497668

SEQ ID NO: 535872 - DNA, 639 bp, Stenotrophomonas maltophilia; identical to SEQ ID NO: 497667

SEQ ID NO: 535873 - DNA, 1170 bp, Stenotrophomonas maltophilia; identical to SEQ ID NO: 497666

SEQ ID NO: 535874 - DNA, 3303 bp, Stenotrophomonas maltophilia; identical to SEQ ID NO: 497665

SEQ ID NO: 535875 - DNA, 852 bp, Stenotrophomonas maltophilia; identical to SEQ ID NO: 497664

SEQ ID NO: 535876 - DNA, 300 bp, Stenotrophomonas maltophilia; identical to SEQ ID NO: 497663

SEQ ID NO: 535877 - DNA, 414 bp, Stenotrophomonas maltophilia; identical to SEQ ID NO: 497662

SEQ ID NO: 535878 - DNA, 675 bp, Stenotrophomonas maltophilia; identical to SEQ ID NO: 497661

SEQ ID NO: 535879 - DNA, 513 bp, Stenotrophomonas maltophilia; identical to SEQ ID NO: 497660

SEQ ID NO: 535880 - DNA, 384 bp, Stenotrophomonas maltophilia; identical to SEQ ID NO: 497659

SEQ ID NO: 535881 - DNA, 1119 bp, Stenotrophomonas maltophilia; identical to SEQ ID NO: 497658

SEQ ID NO: 535882 - DNA, 1119 bp, Stenotrophomonas maltophilia; identical to SEQ ID NO: 497657

SEQ ID NO: 535883 - DNA, 2091 bp, Stenotrophomonas maltophilia; identical to SEQ ID NO: 497656

SEQ ID NO: 535884 - DNA, 1437 bp, Stenotrophomonas maltophilia; identical to SEQ ID NO: 497655

SEQ ID NO: 535885 - DNA, 696 bp, Stenotrophomonas maltophilia; identical to SEQ ID NO: 497654

SEQ ID NO: 535886 - DNA, 582 bp, Stenotrophomonas maltophilia; identical to SEQ ID NO: 497653

SEQ ID NO: 535887 - DNA, 294 bp, Stenotrophomonas maltophilia; identical to SEQ ID NO: 497652

SEQ ID NO: 535888 - DNA, 303 bp, Stenotrophomonas maltophilia; identical to SEQ ID NO: 497651

SEQ ID NO: 535889 - DNA, 684 bp, Stenotrophomonas maltophilia; identical to SEQ ID NO: 497650

SEQ ID NO: 535890 - DNA, 180 bp, Stenotrophomonas maltophilia; identical to SEQ ID NO: 497649

SEQ ID NO: 535891 - DNA, 375 bp, Stenotrophomonas maltophilia; identical to SEQ ID NO: 497648

SEQ ID NO: 535892 - DNA, 237 bp, Stenotrophomonas maltophilia; identical to SEQ ID NO: 497647

SEQ ID NO: 535893 - DNA, 663 bp, Stenotrophomonas maltophilia; identical to SEQ ID NO: 497646

SEQ ID NO: 535894 - DNA, 357 bp, Stenotrophomonas maltophilia; identical to SEQ ID NO: 497645

SEQ ID NO: 535895 - DNA, 288 bp, Stenotrophomonas maltophilia; identical to SEQ ID NO: 497644

SEQ ID NO: 535896 - DNA, 195 bp, Stenotrophomonas maltophilia; identical to SEQ ID NO: 497643

SEQ ID NO: 535897 - DNA, 276 bp, Stenotrophomonas maltophilia; identical to SEQ ID NO: 497642

SEQ ID NO: 535898 - DNA, 435 bp, Stenotrophomonas maltophilia; identical to SEQ ID NO: 497641

SEQ ID NO: 535899 - DNA, 198 bp, Stenotrophomonas maltophilia; identical to SEQ ID NO: 497640

SEQ ID NO: 535900 - DNA, 186 bp, Stenotrophomonas maltophilia; identical to SEQ ID NO: 497639

SEQ ID NO: 535901 - DNA, 375 bp, Stenotrophomonas maltophilia; identical to SEQ ID NO: 497638

SEQ ID NO: 535902 - DNA, 414 bp, Stenotrophomonas maltophilia; identical to SEQ ID NO: 497637

SEQ ID NO: 535903 - DNA, 180 bp, Stenotrophomonas maltophilia; identical to SEQ ID NO: 497636

SEQ ID NO: 535904 - DNA, 453 bp, Stenotrophomonas maltophilia; identical to SEQ ID NO: 497635

SEQ ID NO: 535905 - DNA, 126 bp, Stenotrophomonas maltophilia; identical to SEQ ID NO: 497634

SEQ ID NO: 535906 - DNA, 312 bp, Stenotrophomonas maltophilia; identical to SEQ ID NO: 497633

SEQ ID NO: 535907 - DNA, 354 bp, Stenotrophomonas maltophilia; identical to SEQ ID NO: 497632

SEQ ID NO: 535908 - DNA, 489 bp, Stenotrophomonas maltophilia; identical to SEQ ID NO: 497631

SEQ ID NO: 535909 - DNA, 744 bp, Stenotrophomonas maltophilia; identical to SEQ ID NO: 497630

SEQ ID NO: 535910 - DNA, 390 bp, Stenotrophomonas maltophilia
atgcggaatttcaagaagaagcggcgccctggaaacagggcgatgagaaagtctgaggcagcgcgcgttgatgaggcgaaagtgacggtgtgcatcccgtgcttgatctggtcggaaatggggcgcatgccgtttgagcacgtggccacctgcagcgactacaaccacgtgaagtcggggaacatccgcatcagccatgcgcacggttacgccggatgcctctggcatcatcgcgggcgcatcgaagtggacggttggacgcatgcgcggatgcgcgagtatttcggccccagtctggccgaaggctcgcgcacgttccacgagacattcggaagcgacgatgacctcattgcgcgccagacggcgctgctgacgggagaggcggcgtga

SEQ ID NO: 535911 - DNA, 282 bp, Stenotrophomonas maltophilia; identical to SEQ ID NO: 497628

SEQ ID NO: 535912 - DNA, 384 bp, Stenotrophomonas maltophilia; identical to SEQ ID NO: 497627

SEQ ID NO: 535913 - DNA, 870 bp, Stenotrophomonas maltophilia; identical to SEQ ID NO: 497626

SEQ ID NO: 535914 - DNA, 294 bp, Stenotrophomonas maltophilia; identical to SEQ ID NO: 497625

SEQ ID NO: 535915 - DNA, 357 bp, Stenotrophomonas maltophilia; identical to SEQ ID NO: 497624

SEQ ID NO: 535916 - DNA, 891 bp, Stenotrophomonas maltophilia; identical to SEQ ID NO: 497623

SEQ ID NO: 535917 - DNA, 885 bp, Stenotrophomonas maltophilia; identical to SEQ ID NO: 497622

SEQ ID NO: 535918 - DNA, 1668 bp, Stenotrophomonas maltophilia; identical to SEQ ID NO: 497621

SEQ ID NO: 535919 - DNA, 357 bp, Stenotrophomonas maltophilia; identical to SEQ ID NO: 497620

SEQ ID NO: 535920 - DNA, 567 bp, Stenotrophomonas maltophilia; identical to SEQ ID NO: 497619

SEQ ID NO: 535921 - DNA, 903 bp, Stenotrophomonas maltophilia; identical to SEQ ID NO: 497618

SEQ ID NO: 535922 - DNA, 168 bp, Stenotrophomonas maltophilia; identical to SEQ ID NO: 497617

SEQ ID NO: 535923 - DNA, 1038 bp, Stenotrophomonas maltophilia; identical to SEQ ID NO: 497616

SEQ ID NO: 535924 - DNA, 312 bp, Stenotrophomonas maltophilia; identical to SEQ ID NO: 497615

SEQ ID NO: 535925 - DNA, 249 bp, Stenotrophomonas maltophilia; identical to SEQ ID NO: 497614

SEQ ID NO: 535926 - DNA, 510 bp, Stenotrophomonas maltophilia; identical to SEQ ID NO: 497613

SEQ ID NO: 535927 - DNA, 1920 bp, Stenotrophomonas maltophilia; identical to SEQ ID NO: 497612

SEQ ID NO: 535928 - DNA, 243 bp, Stenotrophomonas maltophilia; identical to SEQ ID NO: 497611

SEQ ID NO: 535929 - DNA, 1482 bp, Stenotrophomonas maltophilia
atgtacccgtcgatgctgttcgacggcgagaagccgctggatgaagtgacgttcgacctgtacccgcagggcgagtcgcagtacacgctgtacgaagacgatggcaacacgcgccgctaccagcagggtgagtcgagcacgcagcagatccgagtgcaggcgccggtgcagggcagtggcccggtgcaggtgcagatcgatccggtgcaggggcagtacactggccagatggcgcagcgccgttatggcctgcgcgtgctcagccgccaggcgccgcgtgcggtgcaggccggtggccgcgcgttgccggcgctggccgatgcggcggcgttcaacggtgcggctgaaggctggtacttcgatgccaaggagcgccgtggcacgctgcacgtgcgtaccgctacccaggacatccgccagccgctgcaactgcagctggacttcgcggtggtcgctgcggccgccgacgatgcctatccggctgcgccggtgctgggccgcgaactgccggccgacagcctgctggtggttaaccgcccggccgaagagcctggccatgcgctggaaaatgccttcgatgacgatccggccacctggttccgcagtgtgcgcaaccaggccgtgcgcaccggtgcgcatgagtgggtgatcggcttcggtgagcgcaggatgatcgacggcatcgacatcgcgccgcgcaacgacaagaactggaagcacggccaggtgcgcgactacgaggtgtacctgggcgacagcaatggcgagtggggcgagccgatcgcacgtggcagcctgcagttgaaggagggcgtgcagcgcatcgcgttcccggcccatgccgggcgcctgctgcgcttccgcgtgctgagcgtgcagaaccccgaaggcgacggcgccagcagcaccgacccgatggtcaccgccgcacagggcagcgcccgcgcattcgatgcactgcagccacgcgacgtcggcccgatcgccttgtccaccttccacatcctcgaacaccaggaaccggagcgaccggcccggcagcgctatctctccgagctgccggtgccggccgcgctggccagccaggtgcgcaccgaccagtccttccgtggcgacgccggcatgcgcatgaacggcctgcagttccgccgtggcttgggcgtcggcgccaacagccgcatcgacctgcgcctgcagggcggctggcacctgctgcgtgccgacctcggcatcgacgacgcctgccgcaccgccggtggcctgcagttccaggtctggggtgacaaccgcctgttgtatgacagcggcctggtgaaggcacccggcgtggtcaagccggagctggacatccgaggcctttccaccctgagcctgcgcacgctgggtgcgcagggcagtcaacccgcccaggtctgcgccaactgggccaatgccgtactgatcggccaggagggcgactccgccagcatcgtcgccccatga

SEQ ID NO: 535930 - DNA, 672 bp, Stenotrophomonas maltophilia
atggccgagtggatcaccctggatacgcaccacggcgcggtacgggcctggcaggcactccccgagggcaccgcgcgaggcgggctggtggtggtgcaggaaatcttcggcgcgaacccgcacatccgcggcgtggccgaacgcttcgccgccgagggctatgcggtgctggcaccgtcgttctttgacctgattgatggccccgatgccgacccggatgccctgccctacgacgccgacggcgtgaagcagggcctggaacgggtcagcgcgctgggcatggagaaggcgctggaggtggtccgcgcggcagccacccggctggccccctacggcaaggtcggcaccgtcggctactgctggggcggtacggtagcgatgctgtccgcagtgcgcctgggcctgccctctgtcagctactacggcgcgcgcaacgtccagttcctcgatgagacgccgaaggcgccggtgatcttccacttcggcgcccaggaccgcagcatcccgccggaagcggtccaggcccatcgcgagaagctgccgcagatggccaccttcgtctatccggccgaccacgccttcaaccgggaggtcggacatgcgtatgatccagacagcgccgccctggcgctgcaacgcaccctggacttcttctcggagcatcttggatga

SEQ ID NO: 535931 - DNA, 423 bp, Stenotrophomonas maltophilia
atgagcgaattcgaactcgattcacgcctggccaccgatagcgtgctggtggccgaaggaccgttgtcgcaagtgcggctgatgaacgacgaacgattcccgtggctggtactggtaccgcgcctggccggggtcaccgagtggatcgagctggacggcgagcagcaggacaagctgcgcaccgagctcaatcgcgcctgcaaggccctgaagggcgccgacggggtggagaagatcaacatcggcgcgttgggcaacatcgtgcgccagctgcacttccacgtgatcggccgccatgacggtgatccggcctggccgggcccggtctggggcagcggtcccgcgcaccgctacgaagcggccgcactggaccagcatgtcgcctactggaaggaacggctaggatatccggcccacacctga

SEQ ID NO: 535932 - DNA, 168 bp, Stenotrophomonas maltophilia
atgcgattcaacctcgttgccgccatcctgctgatcctgatcggcctgttcatgctcgccagcaacctcggctggacgcacctgaacctgtccaagctgctgctgacctggtggccggtggcgctggtgggtgtcgggatcgcgatgctgttcgggcgcggaaaataa

SEQ ID NO: 535933 - DNA, 573 bp, Stenotrophomonas maltophilia
atgagcatcaagagtgaccgttggatccgccgcatgtccgagcagcacggcatgatcgagccgttcgaggccgggcaggtcaagcaggccaacggcgagcgcatcgtcagctacggcacgtccagctatggctacgacgtgcgctgctcgcgcgagttcaaggtgttcaccaacatcaactcgaccatcgtcgatcccaagcatttcgactcgggcagcttcgtcgacatcaccgccgacgagtgcatcattccgccgaacagcttcgcgctggcgcgtaccgtggagtatttccgcatcccccgcgacaccctggtggtgtgcctgggcaagagcacctatgcgcgctgcggcatcatcgtcaacgtgacgccgctggagccggaatgggaaggccacgtcaccctggaattcagcaacaccacgccgctgccggcgcgcatctacgccaacgaaggcgttgcacagatgctgttcttccaggccgcggctgatgatatctgcgagacgtcgtaccgcgatcgtggcggcaagtaccagggccagaccggtgtgaccctgccgcggacctga

SEQ ID NO: 535934 - DNA, 948 bp, Stenotrophomonas maltophilia; identical to SEQ ID NO: 497610

SEQ ID NO: 535935 - DNA, 2808 bp, Stenotrophomonas maltophilia
atgaaatacgcaagcaacaccgcacgtcgcaacacgctcgccgtcgccctgatttccgccctgatggccgccgccccggcaatggcccaggacaaggcgaccaacctggacaagatcaccgtcaccggttcgctgatcccgcagacccaggttgaaacccagaccccggtgatgtccatcaccgccgaagacatccagacccgcggcttcagcagcgttgctgaagtgctgcagcagtcctcgctgaccaccggcggcctgcagggtggccagacctcgggttcgttcacccagggcgccgaagcagccggcatgttcggcctgaacccgggttacaccaagtacctgatcaacggccgcccgatgctctcgtatccggcgctgtacaacggtagcgacaccttcaacaacatcagcggcattccgatcgacatcgtcgagcgcatcgaagtgctgcccggtggccagtcctcgctgtacggctcggacgcgatcgccggtgtggtcaacatcatcctgaaggagcgcatggacggcggtacgatgaccgtccgtggcggcacctacaccgaaggcggcggcagcaatatccgcttcagcgcagccaagggcttcaacgcgttcgacgaccgcttccacgcgctggtcaacgtgcagatcgagaacggcagcccgatctggggctaccagcgtgacatcaccaagcagaataacccggtcggctacaccgcgcaggtgccgtcgaacgacttcgccgtcatcaccaatgcagacaacaagctgctgatgatggacccgagccgctgcgccaacgtggcgggcctgtacgacggcaccaccgtcgtcggcaagcgcgcgtcgggcgagtcctgcggttcggtgtacagcgccggctacaagaccctgaagaacggcaagaacagcggccagttctactcgtcgatgaccttcgacgtgaacgacaacttccagctgttcgccgacgtgctgtacagcaaggaaaagaccgagttcacctccggctccagcgccctgtggtggggcacgaagtcggtcatgggtggcttctacgaccagggcgcaggcaaggtcgtgaacctgcagcgcgccttcgcgccggaggagatcggcgcgggcgactacaacaacatcctgaactccgatgagagccgcgcctaccaggtcaccctgggcggcaagggcatggtcggcgactgggattacagcgccagcttcacccgtggcgagtaccgcctggaccagaaccgcttcgtgcgctggaaggacaagatcgaggacttcttcggccagaccgtgctgggcccgcgcctgggcacctacaccgacccgaaggacccgaccgccacgttcggcatctacaacccgaactacgctgccttctactcgccgatcaccccggaccagttcgccagcttcaccggctacggcacccaccgcagcaagacctggcagaacctgggtcgcgtgcaggtgaccaacggctcgctgttcagcctgccgggcggtgacgccggcctggccgtcgtgctggaaggtggcagcgaaggttgggactactcgccggaccaggccttcgtcgacggcaacgtgtggggcaccaccgccgtcgcgggcgccggccaccgcagcaactacgcggtcaccagcgaactgcgcatgccggtgctggagaagctgaccgtcagcgcctctggccgctatgacgcgttcaagatcgcagacaagaccgtcgacaaggccacctacagcatcggtctggaattccgcccgatcgagagcctgctgctgcgcggcaagtacggcaccgccttccgtgcaccgaccctgtccgatgccttccagggcatgagcggctcgtactcgtccggccagaacgactactaccgttgcagccagctgggctacggcctgcgcgacgagaagtgcgcgttctacaagaacacctcggtgtacagcgaaaagtccggcaacccggacctgaagccgatcaccgccgacgtgtggagcgcaggcgtggtgtgggccccggtgagcaacttctcgctgtcggccgactactacaactggaagatcaagaacgaggtcaagaccctcagcaccgaccagctgctgctggccgagtaccagtgccacaacggcctgccgaacaacacctcggccagctgccagaacgtcaccgactgggtgtcgcgcgatgccggcggcaacctgacccgcgtgtacacgccgaagctcaacgtcgccagccagaacctggaagcggtgacggtggcggccaagtaccagcaggatatcggtcgcttcggctcgctgatgttctccggcaactacacgaacatgctgaagcgtgaagtgcagccgatgccgggcgccgccaagctcgacctgctgagcgatccgtacaacatgtggtactacgacaacttcgccaaggtccgtggcgatctgtcggtggcctggaacatcgccaagttcaccaccaccgtgtacgccaactacgtcggcagcaccccgaactacctggcctacaccggccgcagctacggctatgtccactcttccggtgccaaggccggcaagtggggttcgtacaccacgtacaacctgagcatgaactaccaggcacaggacgatctggtcctgtcgctgatggtcaacaacgtgttcaacaagctgccggaaggccagcgctacaactacccgggcaacgaatcgaccccgttcaatgacggcttctacagcgtctacggccgccagatctcggcccaggtcaagtacaacttctga

SEQ ID NO: 535936 - DNA, 2823 bp, Stenotrophomonas maltophilia; identical to SEQ ID NO: 497609

SEQ ID NO: 535937 - DNA, 3087 bp, Stenotrophomonas maltophilia; identical to SEQ ID NO: 497608

SEQ ID NO: 535938 - DNA, 2010 bp, Stenotrophomonas maltophilia
atgcccaatttccgtccgcttgccatcgccctgggcatcagcctggcgaccctggtcccgacccatgatgcgttcgccgccgccaagaagaaggccgcgcgcgccccggccgtcagcgcccagtgcagcgacttctatgacgccaccaacgcaggctggctgaaggccaacccggtgccacagaccggtgccaccaccgcgctgggccagctggtcgaccgcagccgtcagcagcagcgtgaactgctcgacgcagcgatgaaggcgccgcagggcaacgtacagaaactgctgggcgacttctgggccagcggcctggacgaagccgccgtggaagccgacggttccaatccgatcgccccgctgctgacccgcatcaacgccatcaagaaggccaaggatgtgccggcctcgatcgccgcgttgcaccaggtcggcatcccggtggccttcaacttcggcccggacgtggacctgaaggcgctggaccgccacatcggttacttcatgcagggcggcatgggcctgccggacccggcgttctatacccgcaccgacgccgacaccgtggcgctgatgggccgctaccgcaattacgtcaagcagatcctggcactgaccggcactccggccgccaagctggatgccgagtcgcaatcggtgatcgcactggaaaccgaactggcgcgcaacgcgcagtcgctggctggcatcaacaacccgttcaacaactacgcgccgatctccaccaaggagctcaacagccgctaccgcaacctgcagctggatgccttcctgaaggcccagggcgtggacgacgacctggtctcgctggccgacccgggcctgttcaagcagctcgatggcatggtcaccaagctcaagccggaccagtggaaggcctacctgcgctggcgcgtgggcgactcgatggcgccctacctgtccaaggcctaccgcgacgccgaattcgaattccgtggccgcgtgctgcgtggcgagaccctgccgccacagcgttgggaagacgtgctcgatgcgatcaacgtggccgctggcccgatgctcggccgcgagtacgccgcccgctacctgtcggccgaagaccgtcgccaggcggcgtggatcgtcgacaaggtgcgcgaagtgcagatcgaagcggtcaagaacagcagctggatgagtgccgaggccaagaccgaagcgcaggccaagctggccgcgctgaagatcgagatcggcaccccgctgcgcgacctcgactacagcgtgcagccgatgggccgcggctcgttcggcggcaacatgctgatcgcgtcgacctggcgccatcgcgaggaaatgaagcgcatcggcaagggcaacgccgaccgccgctgggacgtgctgccgcagcagccgtcgctggcctatgacctggcgcagaaccgcctgatcgtcaccgctgcgatcctgcaggggccggtgttcaacgccaaggccgacgctgccgacaagttcggcagcttcggtggcctggtcggccacgagctgacccgtgcgatcgatgccaagggcgcactggtcgatgccaagggcgaactgcgcagctggtggacgccggccgacaagaccgcctggaccctgctcggcaatcgcgtggccgcgcagtacagcgcgtacgacttcccgggcgtgaagggtgccaaggtcaacggcacgctcacccaggaagagaacctggccgacatcgccggcctggaactggcctgggccgcgtacaccgcgcaggagccgaaggccaagcaggcacagcaacagggcttcttccgcgcgtggtcggcgttgtgggcgcagcagctgtcgccgaacgaggccgtgcgtcgcctgaccgccgacatccgtgcaccgggcctgtggcggagcaacggcacgctggccaacctgccggcgttcggtgccaccttcagctgcaaggccggccagccgatgcagcgcagcgaagccgagcagatcaaggtctggcgctga

SEQ ID NO: 535939 - DNA, 3024 bp, Stenotrophomonas maltophilia; identical to SEQ ID NO: 497607

SEQ ID NO: 535940 - DNA, 495 bp, Stenotrophomonas maltophilia
atggcacacaagaacaccatctgcgtctggtacgacaacggcgcgctcgaggccgccaccttctatgccagcctcctgcccgacagcgcggtcaccgccgtgcatcacgcgccgggcgactacccggatggcaaggaaggcaacgtgctgaccgtcgaattcaccgtctgcggcgttccctgcgtcggcctcaacggcggcagcgcgttcaagcacagcgaagcgttctccttccagatccagaccgaggaccaggccgagaccgaccgtctgtggaatgcgatcgtcggcaacggtggccaggagagccaatgcggctggtgcaaggatcgctggggcatctcctggcagatcagcccgcgcatgttgatcgaagcagtgaccagcaaggacaaggcactggccaagcgcgccttcaacgcgatgatgccgatgaagaagatcgacatcgccaccatccaggccgcaatccaaaaaggcgacggaggggattaa

SEQ ID NO: 535941 - DNA, 1584 bp, Stenotrophomonas maltophilia
atgtcctgggatgcaatcatcatcgggggtggccacaacggtctggtctgtgcggcctatctggcgaaggccggcaagaacgtgctggtccttgaacggcgcggcgtgctcggcggagcggcggtcaccgaggagttccatcccggcttccgcaactcggtggcgtcgtacacggtgtcgctgttgcaaccgaaggtgatcgaagacctgcaactgcatgcgcatgggctgcgcattgtcacgcgcccggccaacaacttcctgccattgcccgacgaccgctacctgttgtcggcacctggccgcacccaggccgaagtcgctggattctccgctcgggatgcacagcgcctgccagcgtacgaagcacgcctggagatcttcgccgatgtactgcgcgcgtgggctctccgcgcgccaccggacatcggcgtcgccggcggctggcgcggcctgcccgcactttggcagatggggaagctcggccgcgaactggcggcgctggatgcaccgctgcggcaggagctgctggacctgttcactctgtcggcggcggaatacctggaccgctggttcgagagcgagccgatcaaggcgctgttcggcttcgatggcatcgtcggcaactatgccagtccatacacaccgggcagcgcctacgtgttgctgcatcacgtgttcggccagtgcaatggcgtgaagggtgcatggggccatgcgatgggtggcatgggcgcgatcagccaggccatcgccagcgcggcgcgcgaggccggggccgagctgcgcgtggatgccggcgtgcgacgggtactgaccgaacagggccgcgccgtgggggtggaactggccaacggcgaaaccctgcgtgcacgcgcggtggtcgccaacgtcaatccgaagctgctgtacgaacagctgctggagccggcgcaggtaccggctgccacacgcgaacgcatgacgaactggcgctgcggttccggcaccttccggatgaatgtggcgctgtcgcggttgccggagttccgcgccctgcccggtccgggcgatcacctcagtgccggcatcatcatggcacccagcctggactacatggatcgcgcctggctggatgcgcgccgcgacggttggtcgcgcgaaccgatcgtggaaatgctgatacccagtacgctggacgattcactggcaccgcccgggcagcatgtggccagcctgttctgccagcacgtggcgccggtacttcctgatgggcgtcactgggatgaccaccgcgagacggtagccgacctgatgatcgctaccgttgaacgctatgcgcccggcttcgctgacagcgtgctcggtcgtcaggtgctgtccccgctcgatctggaacgcaccttcggcctggtcggcggcgacatcttccacggcgcactgagcgccaaccagttgttctcggcgcggccgatggtcggccaggccggctatcgcggcgcccttcccggcctgtatctgtgcgggtcgggtacccatcccggcggtggtgttaccggtgcaccggggcacaatgcggcgcaggtggtgctgcgggacctgtag

SEQ ID NO: 535942 - DNA, 675 bp, Stenotrophomonas maltophilia
atgttcccgcgactgccaaccgtcaccaaggccctgctgatcgccaatgcgatcctgttcctgctgcagcagccgttcctgctcggcatgcagaccttcgagccgttcatgctgcaaccgctgcagcagggcttcgatgcgttctcgccgggcggcaacttccagccgtggcagctgctgacctatggcttcctgcatggcagcttcggccacctgttcttcaacatgctggcggtcttcatgttcggcgcgccgctggagcagacctggggcgagaagcgcttcctgctgtattacctggtgtgcgtggctggtgcaggcgtctgccagctgctggtgggcacgctgctggaaaacccggcgacggtgctgggcgcctccggtggcgtgtttggcctgctgctggcctacggcatgctgttccccaaccagcgggtgatgctgctgttcccgccgatcccgatgaaggcgcggaccttcgtgatcctgttcggcgtgggcgaactggtgctgggcatgaccggctggcagccgggcgtggcccatttcgcgcacctgggcggcatgctgttcggctggttgctgatccgttactggcgcgggcagccgccgttcaacaagcgccgcccgcccggcccaccgaagcgcccgaaccatctgcgcagcgtgaagtga

SEQ ID NO: 535943 - DNA, 273 bp, Stenotrophomonas maltophilia
atgggctacggccaggtggcgatgcgcgcgggcctgcccgggcgtgcacgcctgaccgcgcgcatcctgggccagaacgacgacccggacctgccctggcaccgcgtgctgcgctcggatgggcgcatcgccatggaagaagggtcggccggatggcgcgagcagtcacagcggttgcgcgcggagggcgtggtggtggagaacggccgggtgcggatgccggcggctgatccggcagcggcactggatgccgctgtgtggggcccgggctga

SEQ ID NO: 535944 - DNA, 921 bp, Stenotrophomonas maltophilia
atgtccagccccgcttcccgtatcgccaccgcttccccacgcatcgcgctgggaggcatcggcctggccgccatcggcgccatcgccgcctccggcaaggccatcatcgtcaagctcggactgcgtcacggcgtggatgccaccacgctgctcgccctgcgcatgctgatggcgctaccgctgttcgtactgatggcactgtgggccgcgcgccgggccgagccgctgacctgggccgaccgtgcccgcgttttgtggctgggcttcaccggctactacctgtccagtctgctcgacttccagggcctgcagtacatcagcgtgacccttgagcgcctgattctttacttgaacccgaccctggtgctgctgatcaacgtgctgctgacgcgccagcggccgggtcggtggcagatcggcgcgctggtgctgagttacctcggcgtgctgctcgccttcggccacgatctgcagcgcgagggcgggcagatcatcgtcggcagcctgctggtactgggcagtgcgctcagctacgcgctgtacctgttcggcagtgggcaggtagtcgcacgcatcggcgcggtgcggttgaccgcctatgccagctgcgtggccagcgtgctggtgctgctgcatttcgcggtgacccatccgctgccgttgctgtggcaggcaccggcgccagtgcaatggctgtcgctggtcaatgccaccgtgtgcacggtgctgccggtgctggcgatcatgctggcggtgcagcgcgtgggttcgtcgctggccgcgcaggtcggtatgctgggccctgtttccaccatcgtgatgagcctatggctgctcgacgaaccgatggggccggcgcagatcgccggcaccgtgctggtgctgatcggcgttctgctggtgacccgcctgcggcgctga

SEQ ID NO: 535945 - DNA, 1359 bp, Stenotrophomonas maltophilia
atgagcactgcaccctatgattacgacctgatcgtccttggcggtggttccgccggcctggctggcgcgatccgcgccgcgcagcacggcaagcgcgtggcgctgctggagcctggtgaactgggcgggacctgcgtcaacgtcggctgcgtgccgaagaaggccatgtggctggcggccgacctgcacgagcgcatcggcctggccagtgcgatgggtttcgatgtcaaggcacgcccggcattgtcgtggaaggagctggtgatccatcgccaggcctacatcagcaacatccacaccagctaccacaagcgcctggacgaaaccggcgtggtgcgcattccggcgcgcggtcatctgctcgatgcgcataccgtggcctgcagcgatggcgtgcgttacagcgctgaacacatcctgatcgccaccggcgcgcacccgctgcggcctgacatccccggtgccgaactgggcctggtctccgatgatttcttcgatctgcgcgcggcaccggccgaggtggcgatcatcggtggcggttacatcgcggtggagctggccggcctgctgcaggcactgggcagcaaggtgagcctgctggtgcgtggccagcggctgctggatcgcttcgattacgacctgaccgatcagctggccgagaacctgaagcagcagggcgtgcgcatccatttcggctatcgcctgcgcgaactgcagcgcgatggcgaacgcgtacgtgcattcggccatgatggcccgctcgacagcgtgttcgacgcggtgttctttgccaccggccgccgtggcaacagccgcgatctgggcctggaagcgctcggcatcggtatcggcgaacaccagcaggtgcaggtggacgaatggcagaccacgtgtgtgccgagcgtgcacgcggtgggcgacatcgctggcaaggtcggcctgaccccggtggcggtggccgcttcgcggcggctgatggaccgcctgttcggtggccgcccgcagtcgaagatggattacgagaacgtggccagcgtggtgttctcgcatccaccgctgggcgcggtgggcatgagcgaagaagaggcgcgcgcgcggttcgatcaggtgagcgtctaccacagccgtttccgtccgatgctgcaggggctggccaatggcacccagcgcagcctgttcaagatggtctgtgctggtccggaagaacgggtggtgggcatccacctgctgggcgaagcggccgacgagatcctgcaggggtttgcggtggcggtgaagatgggcgcgaccaaggcccagttcgacgacaccgtggcgatccacccgacctcggccgaggaagtcgtgctgatgcgctga

SEQ ID NO: 535946 - DNA, 1251 bp, Stenotrophomonas maltophilia; identical to SEQ ID NO: 497606

SEQ ID NO: 535947 - DNA, 1245 bp, Stenotrophomonas maltophilia
atggcggacctgcccgacggacgccccgtgaacgccgcttctccttccctgcagccggtggcttccggcgaacgcatcgccgtgctggacgtgctgcgcggtgctgcgctgctgggcatcctgctgatgaacatcgaggccttcagcggaccgctggacctggccttcaccggcatcgacgtgcattggcagggtatcgactactgggccgatgcctttgtctacgtattcgtgcaggggaagttcttcaccctgttctcgttgctcttcggcgccggcttcgcggtgatggcgcagcgcgccgaggcggccgggcgtgacttcaccccgttctacctgcgccgcagcgctggcctgctgctgatcggcctgtgccacgcgctgctggtctggtccggcgacatcctggtgatgtacgcgttggtctcgttgccgttgctggcctgccgcgaggcgccgcgcagctggctgccgtggatgggtgtaacggtctatctcggcggtgtggcgatgatgctgctggtcggcgcgatggtgtcgatggcttcggcggaggacgtgcggaagatgctcaccgacgcgcagcagagcatcgatctgcagcgcctggtgtacgggcagggcagctggatgcaggccaatgcgcagcggctgagcgagttcggcacgtcgatgggggcgatgctgatcaccggcccggaagtgctgggcatgttcctgatcggcagctggtttgccggcagcggcgcgctggccacgccggatcgcttcccgcggctgtatgcggtgttgcgttggggggcgctgcccttcggcctgctggtcacgctgctgggtgttgcctggaagccgtatctggcgccgggcgcttacgatctgccggttacggcggcgatggcgttggtgacgatcggcggcctgccgatgtgcctgggttacctggcctggatcgtacactgccgcgcgcggctgggctggctggcgccggtcgggcgcatggcgttgacccattacctcggccagtcgctgctgtgcacctggctgttctaccactacggcctgggcgcgttcgaaacgatgccacgcagcgtgcagttgatgttcgcgctgctgctgttcaccgtgcaggtgggcatctcgcacgtatggctgcgccgcttccgctttgggccgatggaatggctgtggcgcgcgatgacctatcggcagtggccgccgatgcggcgcgaggccggccagggctga

SEQ ID NO: 535948 - DNA, 558 bp, Stenotrophomonas maltophilia
atgatggcggcgtccccgccgggcgacaacccgccccaacccgcctgcctccggcagatccagacagagttgcgcatgaagatcgaaaaagaccgcgttgtccgcttccactacaccgtttccgaagtcggccaggagccgatcgaatcgtccaaggaccgcggcgagccgctggcgatcctgatcggccacggcaacatcatcccgggcctggaaaacgccatgatggacaaggaagccggcgcgaccttcagcgttgacgtcaacgcagccgatgcctacggcgagcgccgcgagggcctgtcccagcgcgtgccgaagaagcatttcggcaacaccaagctggctccgggccagcaggtcgtgctgcagaccaacttcggcccgcgtgcggtgaccgtgcagaaggtcggcatgagcgtcgtcgacgtcgacctgaaccatccgatggctggcaaggacctgcacttcgacgtggaaatcgtcgatgtgcgcgaagccggcaaggaagagatcgaccacggccacgtccacggcgacggcggtcaccaccactga

SEQ ID NO: 535949 - DNA, 1995 bp, Stenotrophomonas maltophilia
atgagcgagcgccgcgacgacgatttccgcgtgcgccccagcgccccgaagaaccggggcaagggccagggccagagcttcgtttccaaggtactcaagcaggctggcaaggccagcggcggcaagtcctcgatgcgccattccgcagccggcggcagtggcgcacgcgcaggccagaggcccggctcgcgcctggggcgcggctatacggcggcgcgtttcgccggggcgaagctgacgcccatgtctcggcgcgtgaccatcaagaccctgctggtcaatcagcgcaatgccagcccgcaatcgctcgccaagcacctgcgctacatcgagcgcgatggcgccggccgcgatggcgaacctgggcgggcctacgggccgcagaccgacgaagccgacctcgatgccttcaaggaacgggcggccgacgaccggcaccatttccgcttcatcgtgtcgccagaggacggcgccgagctggacgacctgcgcacctacacccggcatctggtgaaccggatggaagccgacctgggcacgcggctggattgggtggcggtcgatcactggaataccgacaacccgcacacccacctgatcgtgcgcggacgcgacgacaccggcaaagacctcatcatcgccggcgactacatcgcccacggtttccgccatcgcgccgtcgagctggcgacggaatggctggggccgcgcaccgaactggagatccagcagaccttgcagcgggaagtgaagcaggagcggtggacgagcctcgaccgcacgttgcagcgcgaagccggcgaggacggccgggtgcagatcgaacgcttcaacgaaccccggctgcaacgccagcgcctgctgctgatcggccggctgcaacgcttgcagcgcctgggcctggccgacgagacgcagcccggcacctgggccgtccatgcggacgcggagaagaccttgcgcgctctgggtgagcgtggcgacatcatccgcaccatgcaacgggccatgagcggccagccgcgcgagctggcggtgttcgagccgggcgacgacggccgtaccgtcatcggccgagtggctgcaaaggggctggccgacgagctgcacgaccgcggctatctggtcatcgacggcgtggacggcaaggcccactacgttgcgttgaacgcccgcgacgagctggcgaactatccgaccggcgcggtggtggaggtgcgcggttccgccgaggtgcgggcggccgacaagaacatcgccgcgctcgcgagcgatggcctgtaccgcaccgatcatcacctggcgatcgagcaaggccgggccacggctggccgcgacccgcaagaggtcgtcgcggcccatgttcgccggctggaagccctgcgccgggccggcatcgtggagcgcgtggccgatggtctatggacggtgccggacgacctggccgagcgtggccgccaatacgacgcgcagcgcctgggcggcgtggcggtggagctgaaatcgcacctgtcgatcgagcggcaggcccgcgtgatcggggccacctggctggatcagcagttgatcggcggcggcaaagggctgggcgacttgggctttggtggcgaggccaagcaagccttgcggcagcgtgccgatttcctcgaagaacaggggctggccgagcggcgcgggcagcgcatgattctggcgcgcaacctgctgggcacgctgcgcaaccgggagctggcgcaggccgccaaggacattgccgccgataccggactggagcatcggcccgtcgccgatggtcagcgcgtggccggcatctaccggcgttccgtcatgctcgccagcgggcgctacgcgatgctcgatgacggcatgggattcagcctgatgccgtggcggccggtgatcgaacagcggttaggccagcagcttgccgcgacggtacgcggcggcggtgtgtcgtgggagattggacggcagcgtgggccatctgtcgggtag

SEQ ID NO: 535950 - DNA, 597 bp, Stenotrophomonas maltophilia; identical to SEQ ID NO: 498399

SEQ ID NO: 535951 - DNA, 534 bp, Stenotrophomonas maltophilia
atgactgcatccgcttcgcctgccgctggcgcggccacggctgcgctcgcagcaccttccggccagcctgccagcgcgccgctgacgcgcgtggcactggcctacatcgaaccgcgcttcaagctctacctgcgcttcggtgaacctgcgcgcacgcaccagctcgaccgctggcggcgctgcgcggtgttccagccgggcgctatgttctgccgcatccgctggcaggccaacgactacggcacgattcgctggcagctcatggtgatgcaggcttgcacgccgctcgatgcggcgcagcgcatttccggcgtgcagccgggcgcgcgcctgctgctgcacgccgagggcgagaatcaggtgcgcgccgtgctggagcgcatcgacgccatcgaggcgctgggcatcgcgcctatcggtgcctcgcccgtgtactggcgcacgctcgccaaccggctcgctgcgcgcttgccgctgcccgaatacaccgccgagcggcacgccgcatggctcatcgggagggcgctgccatga

SEQ ID NO: 535952 - DNA, 285 bp, Stenotrophomonas maltophilia; identical to SEQ ID NO: 498414

SEQ ID NO: 535953 - DNA, 858 bp, Stenotrophomonas maltophilia
atgtccagcaccgtgctgccgtcccggcagcggccgttgcaggagcgcgaacagctcgacctgttccgcgccttgcccggcgacatggcaccgcgcgacagccaggatttgatggcctatccgttcttctcgctcggcaagtccaagcgggtcaagcccatcgactttcgcgcgggcaacgtcacgatccgcgtggaaggcacgcaggagcacggcatcgccacgatttgggatgcggacgtgctgatatgggcggcctcgcagatcgtggaagcgaaggacgcgggcctgcggccgtcgcggctgatgcgcgccacgccctacgagatcctgcgcttcatcgggcggggcaagtcgctgcgcgactaccagcgcctcaaggccgcgctggatcgcctgcaatcgaccacggtggccacgtccatccgcgagacgaccgggcggcggctgcaccgcttctcctggatcaacgaatggaaggagctggccgacgccagcggcacgccgctgggcatcgagctgatcctgccggactggttctatgccggcgtgctcgacgccgccctggtgctgaccatcgacccggcgtacttccggctgaccggcggcatcgagcggtggctgtaccgcctggtgcgcaagcacggcggcaagcaggaatacggctggcagttcgactttcgctacctgcaccagaaatccggcagcactgcgaagccctacgacttcgcctgcgacctgcgcgcgctggtcgcgcggcagtcgctgcccggctacgtcctgggcatcgagcggatgccggacagcggcatggagctgctgacgttccgacccgtgccgcatacggcacggggataa

SEQ ID NO: 535954 - DNA, 771 bp, Stenotrophomonas maltophilia
atggtcgatcacagcgccgagccttggtatccgactgccgcgtatctgtacgtgctgcatctggacggccttgcgcttgcctgggaatacctgcgccggcatcccgactaccggctcgactggctgcgccgtcatcgtcggccacaagcagcccagcaggcggcgcatcactggggcttgcgcctgctggaagacccggcactggatgcgcgtgacgcgcatccggcctggctgcctggtcatgccgccgtggtgcagctctaccccgatgccgatccgccgctggacgcggcgacgttcgcgttctggcgtatccccggccacaagcaactgctgcatgacggcaaagggctggcgctaatcgcgcgcagcccaggccactgcctgcgcttcgcgctcgcggccggcctggaggacggcatggctgtcgcctatgcctatcgcggcggcgctgccgcgcctgcacgcggacaggtgcccggagccgctctggccgatgccaaacccaggccaacacctaccgcgctgctggaactgcacagcttgcaggcgctcgacgcgaccctggcgggcgcgtccttgcgtgaagtcgcggaaggactgttcggcgtggatgccgcagccgattggtacagcgatggcgggctgcgctccaaggtgcgccgcctggtgcgtcgcggcgatgcgctgatgcgcggcggctaccgccacctagcacagcttccgccgcttgagaagggtcgttttgaagaccaagaaaaacgaccctga

SEQ ID NO: 535955 - DNA, 1263 bp, Stenotrophomonas maltophilia
atgcagcagttcccactgcgccagctgcgcggtgcgcccatgcttgtcgttgagcggatgcggcagcacttcgatatcgccattgccgagctggaagcccagctcggcccccaccttgaagttccccgccagcacccgcgtgcccgccggcatctgctgcaactcttcgcgcaccgccatcgccaacggctgccagccagcgaaattgcgcgggtagtacttgctgcctgccagctgctcgcgcaacgcaggcgtggaggccatcaggtaatagccgaacgccagcaccatgcctgcgcccgccagccaccagccggtgcgccgcagccagcgtggccagccgttgagcaccaccggcaccgccaccagcagggccaggtagcccggcagcggccaatggaaactgatccgctcgacgtcggtgaagaagcccagcaggaagatgcccagcgtggatacgcccccgaccaggccgaagtagcgccactgcacgcgcgtgccgccgcccctgcgggtaccggccagcgccaccttccacatcgccatgcacaggatcggggtgaccagcatgggctggatcaccaggaaccacagcccgttccattcgaacgtccagggatggcgctcgaccacctggaacttcaggccggcgtcgtggttgtccgcgttccatgccagcaacggcagccacgccagcacgcccaccgccagcgcgacccatacgcgcggatcggccagcatgcgccgcccctgcggcagcgccagcaacgcgatgaagccaacgccgatgacaccgatgaaacggtagtgactgagcgcaccgatcgacaggcccagcgcaagcttcatcgccgacgatgcatcaacgttgtgcagcagccgcgcaccggcgtgcaggcagatcaccgcggccagtgccatgggcacatccggcaccgccagcaggcccagcgtcgccgacaacggcatcaacagcgtgaggctgcccgcttgccaaccggccacattgccgaaccagcgcgtggccgtgcgcaccaccagcaacggcagcagcgcgccgatggccaggaacggcaggcgcaacgcgagcacatgctggccaccgatctccacacccaggcgcgccaaccacgcggtcagtccgggaaggtccgaatacgcagcggccagatgctggccttcctgccaatagaacgcctcgtcaacaaacagtggcagccgcgcagccactaccagcttggccgctgtgaccagcgtccataa

SEQ ID NO: 535956 - DNA, 1005 bp, Stenotrophomonas maltophilia; identical to SEQ ID NO: 530016

SEQ ID NO: 535957 - DNA, 420 bp, Stenotrophomonas maltophilia; identical to SEQ ID NO: 511585

SEQ ID NO: 535958 - DNA, 780 bp, Stenotrophomonas maltophilia
atgcgtgtcacccgtacccgtcttgccaccctgatgccgtggctgctgttgctcgccctttgcctgttgccggcactggccttcgctgcgcccggcgcaccgaccacgccactgccggacatcaacgtcggcaagatcggtggtgcgccggtcagcctgccgctgcagaccctgctgctgatgacggcgatcaccctgatcccgtcgatgttgctggtgctgacctcgttcacccgcatcatcatcgtgctgggcctgctgcgccaggcgctgggtaccgggcagacgccgtccaaccaggtgctgctgggcctggccctgttcctcaccgcgatggtgatgatgccgacctgggacaaggcctggagcaccggtatggcgccgtacctcaacggcgagatcgacttccagaccgcctggacgctgaccaccacgccgttgcgcggcttcatgctggcgcagatccgggagaccgacctgatgaccttcgccggcatcgccgggcacggcacctacgccagccccgacgcgatcccgttcccggtactggtcgcatcgttcgtcaccagcgaactgaagaccgccttcgaaatcggcttcctgatcttcatcccgttcgtgatcatcgacctggtcgtggccagcgtgctgatgtcgatgggcatgatgatgctgtcgccgatgctggtgtcggcaccgttcaagatcctgctattcgtgctggtggatggctgggtgctgacggtgggtacgttggcggcgagcttcaatccggcgtga

SEQ ID NO: 535959 - DNA, 270 bp, Stenotrophomonas maltophilia
atgtctcccgaacttgccttgaccgaactgcgtggcggcctgatcaccgtgttgtgggtggccggcccgctgctgctcaccgtgctggtggtgggcgtggtggtgggcgtggtgcaggccgcgacccagctcaacgaaccgaccatcgccttcgttgccaaggcggcggcactgaccgcggtgctgttcgcgctgggcagcctgctgatcggccacctggttgaattcaccacgctgctgttccagcgcattccacacctgatcggctag

SEQ ID NO: 535960 - DNA, 792 bp, Stenotrophomonas maltophilia; identical to SEQ ID NO: 530017

SEQ ID NO: 535961 - DNA, 2136 bp, Stenotrophomonas maltophilia
atgctggtaggcacgtacaacccgtggctggtggcgatctcgttgctggttgccgtgatggcgtcatacaccgcgctggcgatggccgggcgcacggtcaccgcacccggcaagggcgcggcctggtggtggcgcctcggtggtggcttcgccatgggcctgggcatctggtcgatgcacttcatcggcatgctcgccttcgacctgcccattccgctcggctacgacctgccgatcaccctgctctccctggccctggccatcgcctcatcggtgttcgcgctgtggctggtttcgctgcgtaccctgccgcacccacgcctggccggcggggcattgctgatgggtaccggcattgccggcatgcactacgtcggcatggcggcgatgcgcatgcaacccggcatcgactatgacccgggctggctgctgttctcgctgatcgtggcggtcgccgcctcatggactgcgttgtatgtggcattccgcctgcgcgcgcagcgcacccgtgtcggcgaccggctggcagccgctggcctgctcgggctggccatcgttggcatgcactacaccggcatggccgccgcacgctttccggaaggcagcatctgcggcgcggcggtcggcgatggcctgcagaacgagtggctggcgatgctggtagtggtgctgacggtcgcgatcctcgcggtagtgctggtggtgtcctggctggaccagcgggtggaggcgcagctgctgcggctgcgcaattccatgctgagcacttcgttgaccgatgcgcagcaggaactgacccaggccgcactgcatgatccgctcacccgcctgcccaaccgcctgctgttgcagcgccgcatcgtgcaggcactggccgaggccgaacagggcggcagccgcttcgcggtgatgttcatggacctggacggcttcaagcaggtcaacgacgcctatggccaccaggcaggtgacgcattgttggtggcggtggccgagcgcacccgccagctgctgcgcccccatgacatgctggcgcgcctgggcggcgatgagttcgtgctggtggtgcgcatcgagcacgatgaggatctgccaaccctcgcccggcgcatcctgcaggcggtcggcagtggaccgctgctgccggacaacgaactgcaggtaaccgcaagcatcggtgtggcgatctgccccgaccacgccgccagcgagcggcagctgatggcctttgccgacgcggcgatgtaccaggccaaggaatccgggcgcaacgccttcgtgctgttcgccgactggatgaatgacagcgccgaacaacagttccggctgctggccgacctgcgccgggccatcggcagcgagcagctgttcctgcactaccagcccaagatccgcgtggccacgcagaaggtggccggtgccgaagcgttgatccgctggcaccatccggagcatggcctgattccgcccgatcggttcatccgcctggccgagcgcagtggtgcgatcaacgagatcgggcgctgggcgctggaccaggcctgcctgcagctgcggcgctggcacgatgccggtcacgaaggctggtcgatgtcggtgaacctgtcgccggtgcagttcagttcgccgcacctgctgcaggatgtgcgcgcggtgatcgaacgccacaacatcgccccgcgccacctggtgctggaaatcaccgaaagcacggtgatgcgcgataccgacaccagcctgcgcctgctgcaggcgctgtcggcgctgggcgtaggcatctccatcgatgacttcggcaccggctattccagcctgctgtacctgaagcggctgccagccaccgagatcaagatcgaccatgcgttcgtgcgcgacctggaacacagtgcagaggacgtggtgatcgtctcggcgatcgtggcgctgggacatgcgctggacatggacatcgtcgccgagggcgtggagaccgccgcccagcgcgcctacctggagcgcctgggctgcgactacctgcagggctacctgctgggacggccggtcgatgcggcgcgcttcatgcagctgcacgacctgccccggccgcgggtggaactggcgcagagcccgccgcccagtgacaacgcgccccggtag

SEQ ID NO: 535962 - DNA, 2250 bp, Stenotrophomonas maltophilia
gtggccctacgcaccactcttgctggcctgttgctggcccttgctgtcggccagaccgccgccgctgatctgccgtggtcgttgccagccgatgcttccccggcccaggtcgacgccgccctgcaggtcctcggcaagggcgtgttgaagtcgcccgacctgaccgatgcacagcgcggccacgcgctgctggcgatgggccagaccgccgaagcgcggcaatcgatccagcaggcgcgcgcatcgcttgcaagcgaaggtgataccgcagcagtgcaacgctgggtaccgatgctgctgctcgtcaccgccggcgagcaggacgcagcggagtatgcgcgcgccttccacgccaccttcgccgccctcgacgacgttgccgcggtgcaggccggtgccgcactctcggttgagccagcccctgtacgcgcccagctggagcaggccgtcgcggcacaggcgggggcgacgaccattgccgaggctgtcgccctggaactgctgcgcctgcgggcggtactgcgtgcgcagaccctggccgctgccctggcccctccgctggtcgcggcggaagagcagcgccgcttcgccatcgacgacgcattgcgcatccccgttggcgatggcgtcttactgtcggcgcagctggcccgccctcgcgccgcatcggtgcccctgcctgcggccatgctgttcaccatctacaccgatccacccaagaaccggcagaagatgctgctggccgccgcgcatggctacgccggcatcgtggtcgatgcgcgcggcaagggccagggcagcggcaccatcgcgccctacgagcatgacggcgcggacgccaacgcggccatcgactggatcagccgccagccatggagcgatggccgggtggccatgtatggcggcagctacgagggctttactgcctgggcggcggcgcgccatcaccatcccgcattgaagaccatcgtgccctacgttgccgccatccccggccagggcctgccgatggagaacaacgtgttcctgagtgccaactacggttgggcgttctatgtggccaatggcccgatgctggacaacgacacctacaaccagaacgaacgctggtcacagctgccccgccgctggtacgcctccggccgcccttaccggcagatcgaccagatcgacggcacgcccaacccctggctgcagcgctggctcgatcaccccacgtacgacgcctactggcagtcgatggttccctatggcgatcagttcgacgacatccgcatcccggtactgaccatcaccggctactacgacgacggccagatctcggcactgcagtacttcaaggaccacctgcggcaccgccccgatgccgatcactccctgctgatcggcccctatgaccatcgcggtgcgcagtcggcgctcaagccgatgcagctgcgtggatacgacctggacgccgtcgcgcagttcgacacgcccgcactgaccttccagtggctggaccatgtgctgcgcggcgcccctcgcccggcgctggtgcctgaccgcgtgaactaccagctgatgggcgccaatcgctgggggcatgcggcaacactggacgccgccgcgggtgcccaccaccgctaccacatgtcggccgcacccgcttccgccgatggctaccaccgcctgcaggaacagccgccagcgccgggccagctggggcagaccgtggacctggccgaccgcaatgaaatgcggcatggctactaccccttcccgatcatcgcagcacaggacgaaagggatacggcgctgtcctttgccaccgatccctttaccggcccgatggatctggtgggcggcttctccggcgacctgaaggtgaggatcaacaagcgcgacttcgatttcaccgtcaccctgtacgagctgatggccgatggacaccggatgcagctgtcctattacatgggccgggccagccacgtgcgtgacccgggcacgcgccagttgctgcagcccggccaatggacccacctgcccttcgatcgcacgcgcatggtcgcccgccgcctggctgccggcagccgcctgctggtgaaggtagacgtgctgaaggacgccatgcaccaggtcaaccacggcagcggccgcgatgtcagcgacgaatcggccgctgatgcgggcaccccgctgcaggtggattggcacagcgacagtgttctgacgattcccctgcgccccgccagcgactccctacagtag

SEQ ID NO: 535963 - DNA, 2109 bp, Stenotrophomonas maltophilia
gtgagcgcccagccctccaccggattcaacacccgccgtgccctggaaatgatccgccagggccttggcgcgccgctgatcgtgctggccctgctggccatggtcgtggtgccgctggccgcgccggtgctcgacgctctgttcaccttcaacatcgccatctcgctgatggtgctgctggcggtggtctacgtgaagcgcccgctggacttcaccatcttcccgatcgtgctgctgatcaccaccatgctgcggctggcgctgaacgtggcgtccacccgcgtgatcctgctcaacggccagaacggccacgatgccgcgggcaaggtcatcgccgccttcggcgaattcgtgatcggcggcaactatgcggtcggcatcgtggtgttcgcgatcctgaccatcatcaacttcgtggtgatcaccaagggcgccggccgcgtctcggaagtgaccgcgcgcttcatcctggacgcgatgcccggcaagcagatggcgatcgacgccgacctcaacgccggtttgctgacgcgtgaagaagccaagctgcgccgcgaggaagtgcgcgaggaagccgacttctacggcgcgatggacggcgccagcaagttcatccgcggtgacgccatcgccggcatcctgatcctgttcatcaacatgctcggcggcctggccgtgggcgtgctgcagcatggcatgccgttcggcgaagccgctgccacctacaccctgctgtccatcggtgacggcctggtggcgcagctgccggccctgctggtctccagcgcggtggcgatgctggtgacccgcgcctcgcgctcgcaggacatggcccaggcgatgaccggccaggtgttcggccagtaccgcgcgctggcgatcaccgccggcatcatcggcgtggtcggcctggtgccgggcatgcccaacgtcgctttcctgacgctggccgcgatcctcggcttcatcgcctggaaggtctaccgcaagggcaaggccgcagccaccgacccggcagccgccggcaatgacgcggccgcactcaacgcactcggccgcccggcggcacctgcgccgaccgccgaactgagctgggacgaactgcgcccggtcgatccgctgggcctggaggtcggctaccggctgatcccgctggtggacagcaaccagggcggcgaactgatggcgcgcatcaagggcgtgcgccgcaagctgacccaggacgtcggcttcctgatcccgtcggtgcatatccgcgacaacctggaactgcccgccaacggctaccgcgtgctggtgcacggcgtgccggtggccaccgccgagatccaccccgaccgcgaactggcgctggacccgggcagcgcgctgggcaccctggagggcattgccggcaaggatcccgcgttcggcctggatgccacctggatccagccgcaccagcgtgcccaggctgaaacgctgggctacaccgtggtcgacccggccaccgtggtggccacccacctctcgcacctgatccgcgaacatgcgccggaactgctcggccacgaggaagtgcagcacctgctggccaacctggccaagagcgcgcccaagctcgtcgaagatctgacgccgaaggcgctgccgctgtcggcggtggtgcgcgtgctgcagaacctgctggtggagcgcatcccgatccgccagctgcgcaagatcgccgaggcgctggtcgaacacgcgcccagcagccaggacccggcggtgctgaccgctgccgtgcgcaccgcgctgggccgcttcatcgtgcaggagatcgccggaatgtcggcggagctgccggtgttcaccctcaacccgcaattggaacgtgtcttgcaggagtccacgcagggcaacggcgccgcgctggaacccggactcgcagagcgactgcaccagagcctggccgaatgtgtcagcaagcaggaagcgcgaaacgagccggcggtcgtgctggtaccgggcccggtgcgcgccgcgctggcgcgcctggtccgccacagcgttccgtcgttgtcggtcctggcctacagcgaggtgccggaggacaagcgcctgaagctggtcggaacgatcagctga

SEQ ID NO: 535964 - DNA, 1683 bp, Stenotrophomonas maltophilia
gtgcagaccaccgaccacccgagttctccgaccgccaccccgccgtcttcgtcccgtgaccacagcatgaaaatcaaacgattcgtcgccgccgacatgcgctcggccatgaacctggtgcgcaaggaacatggtcctgacgccgtgatcctgtccaaccgccggatcgaggaaggcgtcgagatcgtcgccgcggccaactacgacgagagcgccgtgcagcgtgcactggaagcctcgcgccgtgatgtcgcaccgccgccggcacccaagccgcgcaccgctgctgacgcggtgatcgccgcggtcacccgccgccgcagcagcacccccgcgccggaaccggtcgccgccaccacctcggccgtggccgccctcgcccgtgcggccgttggggccaccggccgtaccctggacagcgccgacgagatcgtgccgacccgtggcagcactggcttcgccgccaccctggcgcgcgccgccgtcaacgaaccggcgctgcccgaacagagcttcgccccgttcgccgaggccatcgtcgcaccggccgccaccgtgccggccaaccgcgcccgcttccagatcgacccgccgcgcgacatgcatcacgaaagcgtggccccggccgtgcagccgccgccgctgccgaccgctgccgtgaccgaagcgcagcccgggatcgccgccagcgaaccggcagcggccgaagccgccggcgaagccagcccggcccccatgctggccccggcaccgacgctgaccgtggttgcccaggacgacgccgagatccgccagctgcgccaggaagtggccggcatgcgccaggtgatcgagcgcgagatgaaccgcttcaccgacgagcgcctgcgtggcagcccggtgcgcgccaccgcgctggacctgatggacgagtacggtttcgacgccgggctggcccgcgacgtggccatgcagatcccgctggagaccgaagcccatcgtggccgcggcctgatgctggggctgatctcgcgcaagctgccgatcgccccggtcgacccgctggaagaaggcggcgtgatcgccctggtcggcccgaccggcgccggcaagaccaccaccatcgccaagctggcctcgcgcttcgccgagaagcatgcgccgcgcgacgtggccctggtcaccaccgacaccacccgcatcggcgcccgcgagcagctgtacggctacggccgccagctcggcatcgcggtgcacgaggccaacagcggcaccgacctggaccagctgctggagcgcctgaaggactacaagctggtgctgatcgacaccgccggcctgggcccgcgcgaccgcgcgctggccgcgcagctgcagtggctgcgcgccgcccgccaggtacgcaccctgctggtgctgccggccaacaccagcttcggcgacatggacgaggtggtccgccgcttcggcgccgccaacctgcagggcctggtgctgagcaagctggacgagaccggccgcttcggcaacgccctgtcagtggccgtggaccacgccctgccgatcacctgggtgaccgatggccaggacgttccggaggacctgcaccgggccagtgcggccaatctcgtacttcgccttgaagatttgcgccgcgcggccgatatgccctgcaacccggagttgaaccatgccgtcgcgtga

SEQ ID NO: 535965 - DNA, 888 bp, Stenotrophomonas maltophilia
atgccgtcgcgtgagtacgccaagctgaccaagaccttcccgctgtcggccacccgcagcgagccgctcggccctgtgcgcaccattgccgtcactggcggcaagggcggcgtgggcaagacgaatgtgtccgccaacctggcggtggcactggccggcatgggcaagcgcacgctgctgctggacgccgacctgggcctggccaacatcgacgtgatcctggggctgaacccgaccttcacgctggccgacctggtcgccggccgctgctcgctggacgacgtcatcgtcgaaggcccgaacggcgtgctggtggtgccggccgcgtccggccgccggcacatggccgagctggccccggccgagcacgtcggcctggtcaacgtgttctccgagctggaacgcgaactggacatcatggtggtggacaccgccgccggcatcaccgacggcgtgctgaccttctgccaggccgcgcaggacaccgtggtggtggtctgtgacgagccggcctcgatcaccgacgcctacgcgctgatcaaggtgctgtcgcgcgaacgcggcgtggaccgcatccaggtagtggccaacatggtgcgcgaccccaacgagggccgcgtgctgtacgaaaagctgacccgcgtctgcgagaagttcctcgccgatgtctcgctgaactacctgggctgcgtgccgcaggacgactggctgcgcctgtcggtgcagcgccagcagccggtggtgaaggcctacccgtccagcccggccgcgctggcgatcaccgagatcgcgcgtcgcaccgcacgctggcaggcgccgaccgaaccgcgtggcggcgtcgagttcttcctcgagcgcatcctcaagcagcgcggggtggccgcatga

SEQ ID NO: 535966 - DNA, 381 bp, Stenotrophomonas maltophilia
atgcgcatcctgatcgtcgatgacttctcgaccatgcgtcggatcgtcaagaacctgctgggcgatctgggcttcaccaataccgccgaagccgaggacgggcatgccgcgctgtcgctgctgcagagccagccgttcgatttcgtggtcaccgactggaacatgccggtgatgaccggcatcgagctgctgaaggcgatccgtgccgatgccaagctgaagaccctgccagtgctgatggtcaccgccgaagccaagcgcgaacagatcatcgaagccgcccagaacggcgtgaacggctacatcatcaagccgttcactgcgcagacgctggaagagaagctcggcaagatcttcgaacgcctggcggccagcgcctga

SEQ ID NO: 535967 - DNA, 606 bp, Stenotrophomonas maltophilia
atggataccacggtcgacaagagcgccctcgccctgcgcctgcaggaagccctggacgcactcgagtccggtgacgaggccgcctggcggcagcgcatcgacggactggtcgcgctgcgtacgcagccgatgatgagcggcctctcgcggctggcccgcgagctggggcaggcactgggtgagctgccgaccgtgcccagcgaggccggtgagctggacgacgcctgcgcacgcctggaccacgtggtggccatgaccgaacaggccacgcaccgcaccctggacctggccgaggaatgccgcagcctgaccgaacagctgcgtgctgaaggcctgcagccgggccaggacgcgcagctcgagcgcatccgccacaacctgaccgagatcgccctgacccagagctaccaggacctgaccgggcagatcatccgtcgcgtggtcggcatcgtccgccgcgtgcacgagggcttcggcgcactcggcctgccgccggaacagcatcgcaccgacccggaactggccgggccggcactgaagggactggaccgccacgcggtctcgcagaacgacgccgacgacctgttgtcggatctggggctgtaa

SEQ ID NO: 535968 - DNA, 1830 bp, Stenotrophomonas maltophilia
atgagcgcggtatccgacgacatcactgccgatttcatcatcgaggcacaggaaatcctggatcgcctgggcgaacagctggtgtcgctggagcaggcaccgcaggacaccgagcagctcaacgcggtgttccgtggataccacacgctcaagggcggtgccggcttccttggcgtcaccgcgatggtcgaactgtgccacgccgctgaagaggccctgggcatcgcgcgtgccgggcaggcggtgctgcaggcccaccacttcgacgccgcccagcaatcgctggactacctgcagtcgatgctggacgccgtgtcctccggcaccgagccaggctatgcgccgccggacctgatcgcgcagttcgacatgaacggtggcactgccgcgccggtcgctgcggccgcgcctgcggcagccggcagcgacctgatcaccgacgacgaattcgaggccctgctcgaccagctgcatggcggcaacgcaccgaccgcggtcgcgccgcccaggaaggccgacgacggcctgatcagcgaagacgagttcgaagcgctgctggaccagctgcacggcggcgctgcgccaggcgcgaagcctgctgccaccgtcgcggcggcacctgccgctgcaccgcgcccggcgcccgtaccggcgcccgccgccaagccggcggccaagccgatggccgaggccgagcacaccgtgcgcgtggacaccaagcgcctggatgcgatcgtcaacctgatcggcgaactggtgctttcccgcaaccgcctgaagaccctgcgtgcacgcctgcgcgacgaggagctggaccgcgccgtatcgacgctggacatcgccactgcccgcctgcagtcggcggtgatgcgtacccgcatgcagccggtgggcaaggtgttctcgcgcttccccaaggtcgcccgcgacgtcgcccgctcgctgaagaaggaagtggacctggagctggtcggcgccgaaaccgaactcgaccgcaacctggtcgaagcactggccgatccgctggtgcacctggtccgcaacgccatcgaccatggcgtggaaatgcccgacctgcgcgaagcacaaggcaagccgcggatgggccatgtacgcctgtcggcgcagcaggaaggcgactacgtcagcatcgaggtgcaggacgatggcgccggcatcgacccggagaagctgcgcgcgaaggcgcgtgagaaaggcctgatcgatccggaagccgccgcccgcctgagcagcgaggaatgcctgcacctggtgttcctgcccggcttctcgaccaagcagcaggtcaccgacatctccggccgtggcgtcggcatggacgtggtgcagtcgcgcatccgcgaactgagcggccagatccagatccagtcggaactgggtcgtggcagccgcttcctgatccgcgtgccgctcaccctcgcgatcctgccgaccctgctggtgcaggccggcgaggacgtctacgcgctaccgctggcacgcgtgatggaagtgctgcacgcgccgcgcacctcgctgggctggttcgatggccgcgccgtgcttgatcgccgctcgcacaccctgccgctggtcgacctgcgccagtggctggatgtgacgccggccgcgtcaaccctgctgaccatcgtggtgctgcaggccggcgaagcgcgcttcggcctggtcgtggaccaggtgcgcgggcgcgaggaagtggtcatcaagccactgccaaaagccctgcgcggcctgcgcggttatgccggtgcaacgttgatcggcgatggtcgcatggcactgatcctggacgtggacggcatacgctga

SEQ ID NO: 535969 - DNA, 741 bp, Stenotrophomonas maltophilia
atggatagactcagcctcattggactctttctcgccctggcctcgctggtcggtggcagcatcctcaagggcgccggcctggcgtcgctgtggtcgcctgcggcgttcgtgatcgtcatcgtcggtaccgttgccgcgatcctgcttcacacctcaccggcggtgttcaagcatgcgttcaagatcgtgcgctgggtcgtgcgcccgccgcacagcgatcgcagcgaactgatccagcagatcgtcgagtggagcaacatcgcccgccgccagggcctgctgggcctggaatcgcaggtggaagcgcagcaggacccgttcctgcgcaagggcctgcagctgctggtggacggcgttgaacccgaatcgatgcgtcacatgctggagatcgaactgggcagccaggagcaccaggaccaggccggcgccaaggtcttcgaagcgatgggcatctacgcgcccacgctcggcatcatcggtgccgttctcggcctgatcgcggtgatgaagaacctggccgacccgagcaaactcggccacggcatcgccgccgcgttcaccgccaccatctacggcatcgcctcggccaatctgctgttcctgccgatcgccgccaagctcaagagcgtgatctcgcacaacacccgcgaccgcgaaatggtcattgaaggcctgatttcgatcgcccagggcgagaacccgcgcaacatcgaaaccaacctctccggcttcctgcactga

SEQ ID NO: 535970 - DNA, 1017 bp, Stenotrophomonas maltophilia; identical to SEQ ID NO: 498728

SEQ ID NO: 535971 - DNA, 783 bp, Stenotrophomonas maltophilia
atgcgcatctgggcagtcgccaaccagaagggcggagtcggcaagaccaccaccaccctcgccctcggccgcggcctggccgcgcttggccatcgcgtgctgctgatcgacctcgatccgcatgcctcgctcagccgcgccttcggcgtgccggtggatccgccgccggcgggcgtgctggaactgttcggcgccccgccggccgatctttccagcctgtgccatgccagcagcatccacggcctggactacgtctgcgcgcagtcggcgctcgccacgctggagcgccgcagcgccaaccagcccggcctcggcctggccctgcagaacgcactggcgcgtcaccagggccagcacgactacatcctgctggactgtgcccccacccttggcctgttgatgatcaacgcactggccgctgccgaccgcctgatcattcccacccaggccgagccgctggccctgcatggcctggacggcatggtccgcaccggcgagatggtcgagcgctcgcgccgccgcccgctgccgatctcgatcctgccgaccctgttcgaccgccgcacccgcgccggcaacgagtcgctgcgcacgatgcaggatcgccacggcacccgcgtctgggaagacgccattccgatcgacacccgcatcagcaatgccgcaggcctgaccctgcccagcgttggtgaggactacccgggccgcggcctggccgcctatcgccgcgcactgaactggatcctcgttgaggatgcccgtgccctggagcaggccgcatga

SEQ ID NO: 535972 - DNA, 1215 bp, Stenotrophomonas maltophilia; identical to SEQ ID NO: 498727

SEQ ID NO: 535973 - DNA, 1992 bp, Stenotrophomonas maltophilia
atgagcatggacctgcaacgcttccacgccaccttcttcgaggagagccgcgaaggcctcgacgcgatggaggctggcctgctggccctggaatcggggcagcaggacgcggagatcatcaattcggtgttccgcgccgcccactcgatcaagggcggcgccggcaccttcggcttcgatgccatcgccggcctgacccacgtgctggaaacgctgctcgatgagctgcgtgccggcaagcgcgccctggaaggccatgccgtcgatgccatgctgtcctcggtggatgtgctgcgcgccctgctgcgcgaagccgaacatggccaggccgcagaccccgcggcggtcgccgcagtgaaggcgcgcctcgaagccgttctctccggccaggccgcaccgagcgcgccggccgctgccgcagccaaggtggacgatacgccggaagcctggcagatcgggttcaccccggcaccctcgctgttcatgagcggcaacgacccgttgcgcatcatccgcgaactggaacacctcggctcgctgcaggtggccgcgcgcatggaacgcctgccgggcttcgcccagctcgacccgctcgaggcccatctggcgtgggacctgggcctggtcggcaaggtgccgcgcagcaagatcgaagacacgttcgcctgggtgctggacgactgcgaactggacatccgtccggccgcgccgccgagcctggcaacccaggcgcccgttgctgcatccccttccacacctgctgccgtcgtgccggcagcgcctgctgcgcctgccgccggcggtgctgccacccaggaagccgaaacgtcgatccgcgtcagcgtcgacaaggtcgatgcgctgatcaacctggtcggcgaactggtcatcacccaggccatgctcaagcaggtctcgcacgcgctggacccggtccacgccgagagcctgttcgccggcctggaccagctggaacgcaacacccgcgatctgcaggaagcggtgatcggcgtgcgcatgctgccggtcgacgcggtgttccgccgcttcccgcgcctggtccgcgacctgtccagccgcctcggcaagcaggtgcgcctgcgcaccgtcggcgagggcaccgagctggacaaggggctgatcgagaaaatcgccgatccactggtgcacctggtgcgcaactcgatcgaccacggcctggaaatgcccgacgtgcgtcgcggcgcaggcaaggacgaaaccggcacgatcaccctggccgcttcgcaccagggcggccatatcgtcattgaagtgagcgacgacggccgcggcctggatcgcgccaagatcctggccaaggccaccgaacgcggcctggccgtaccggacaacccgaccgattcgcaggtctgggacctgatcttccagccaggcttctccactgccgatgcggtcaccgacctgtccgggcgtggcgtcggcatggacgtggttcgccgcaacatccaggcactgggcggtgaggtccagatcgaaagcagcctgggtactggcacccgcacgctgatccgcctgccgctgaccctggccatcctcgacggcatgaccgtggcggttgccggcgaaaccctgatcctaccgctggcctatgtgcttgaggcgttgcagccgcaggccgaggacatccgcagcatggccggcgaaggccgcgtgctgcgcgtacgtggcgagtacctgccgatcctctcgctgagcgagtactacggctacggcaaccgtgcgccgggcagtgaatcgctggtggtcgtggtcgaaggcgatggccagaagatcgcactggaagtggatgaactggtcggccagcagcaggtggtggtgaagaacatcgagaacaactaccgccgtatcggcggggtgtccggtgccaccatccttggcgacggccgcgtcgcgttgatcgtcgacatcggcggactggtgcgctcgttgcggatgccgcaggccgcctga

SEQ ID NO: 535974 - DNA, 465 bp, Stenotrophomonas maltophilia
atgacccgcgctcgcaaggccggcgacggccgtaaccgcgtcctggccgcgatccatgccggcgccaagaagctcggcctctccgaggacgtctaccgtgacctggtcgagcgtgtatccagggagcacggcgttgcccagcgcagcgccggcaaatgcgatcgccggcagctcgatgcgatcgccaacgagttgcgccgcctgggtggcatccccgccaaggcagtgtatgcggccaagcgctgggccggccgtcccaagggcgacctgtccccgcagctgtccaagatcgaagccctgctggccgattcggggcgcgagtgggaatatgcacattcggtggcccgccacatgttcaaggtaggacgcctggaatggtgcaacccggatcagctgtccaaagtgattgccgctcttcagatcgatgccaatcgccgcgcccggcgggaggctccttcggcatga

SEQ ID NO: 535975 - DNA, 768 bp, Stenotrophomonas maltophilia
atgcctgccaagagcgagccgactgcgatcgcgctggccgctggagttagcctggacgccgttgaggtcggcagtgaagcgctgatcgatgacgaactggtccgagtggtgtcgattgacccggtggccgcgacgctgaccgtggcccgtgggtgcgtcgacaccgtgccagtacagcacgcggtgggtgcgcgggtgtggttcaccgatgagtacgtcggtttcgatggtcgcgagtatctggccaacgaagcgcccgaggcaaagctgatcacccgcaccagccagggtgaactgaacccggacctggctacggcgatcgcattgacgatgcgccggcgccacgtccgcccatacccgcccggccgtctgcgtatcaatggcgacgcatacccggccgaggcgtggggcagtggcggcaccgtggtggctgcctggtcgcatcgtgatcgcctcctacaggctgaccagctcgtcgactccgagcagtccagcattggcccggagccaggcaccacctacaccgcccgctggtacctgcaggacaaccttgtgcgtgagcaggccggcatcacggccactaccgacagctatctgccgccggtcggcagtggcggcaagacgctgcgcgtggaaatcgaggctgtccgagccggattcaccagctggcagcgcctgcaacacaccttcctctaccgcgcgcagctggtgaccgaggcgggcgaccgcatcgtcacggaagccggcgacccgatcatcctggagtaa

SEQ ID NO: 535976 - DNA, 762 bp, Stenotrophomonas maltophilia; identical to SEQ ID NO: 499246

SEQ ID NO: 535977 - DNA, 1143 bp, Stenotrophomonas maltophilia
atgccagaagaagaggtgcgcagcctggtccacgtgatgggcgacaaggaggtcgtggagtggtgcgtctgcgacaccgacaatgacggcggggtcacgttcccgcacatcgagaaacacgccctggtggtgatcgatgaggcgcacgagtactggccaaccaaccgggcgaacctgcctgagcgagcggccaatttctttgccaagcacggccatatcagcttggacatggtcatcatttcgcaggactgcaaagacctgcaccggctgatcattcgccgaatggcgaagaagaacacctataccaagctcgatgcgctcggctcggatcagcgctactcggtcaggttctacgctgccacgggcaccggcaagtatgagacggtcggcaccgagacccggaagtatgacccggccatttgggagctgtaccacggcgttcaacctggcatcgagagcaacgaggtctacaaggggaacacccgcacgctgtggaagaccttgcgcgcgccgtcaatcctgatgggcctggcgctgatcgtcggcgtgtacgtgctgggtcggttcttcctcctgggcagcgattcgaccggcacggcagacaagatgaaagaggcggtcgcttcgcagaaggccgccatcccggcgatgggccatgtacccggatcgcaaccggccacggtcgtgaccaaggtggcggaagcacccaagcagaaagaggttcttccagccggcgtgcagtacatcctggacatggcagttcaagccagggcgcggcacgccggctggtacggccaccgcgatattgtcgagttccgggcactgggcggtggccaggtgcttgaccggttcaccactgagcagctttgggccctgggctggtccgtcaaacggacggagttcggcgtactgctgtcggcgaaaggccacgagatcatcgccaccacctggcccgttgatccgttcggcgaacaatccgattcgaccaccgagcgaataagggctgcggcggggtcgcctgtgacgagcgcgagcgagacacagccgaacaccgccgcagcgaacgggagcactctcattgcagttggtaagcgcccgctgggcacgttccccgagacgccgccatatccggccactttctaa

SEQ ID NO: 535978 - DNA, 504 bp, Stenotrophomonas maltophilia; identical to SEQ ID NO: 498871

SEQ ID NO: 535979 - DNA, 1737 bp, Stenotrophomonas maltophilia
gtgagtgcactgggtcccctgccggataccgagcgcgtcctggactgggatgagctgcctgagagcgtgcgctcgatctcggccaacttcgatccgagcaaggccggcgtgctgatggcccatcagtccgaatggatccggatgcaggaagggctggatatcgcggtctgcgaaaagggccgccgtactggcatcaccttcgcccaggcgctgagcgacaccatcaccgccgcctcggccaaggacgccggcggcgacaacgtgtggtacatggccgacaccaaggaaaagggcttggagttcattggctatgtggccaagttcgcgccgatcattgcccagggccaagcctcgcgtatcgagcagcacatcttccaggaccagcagcccgatggcaccagccggcagatccaggcattccgggttcgcttcgccagtggtttccgtatcacggcactgtcatcgcgcccggagaacatccacggcctgcagggcgtggtcgacctggacgaagcggcgctgcacaaggacgtggccaaggtgcttgaatcggccaccgcgctgctgatctggggtggtcgcatccgcgtgtggtccacacaccgcggcaagaagaacccgttcaaccagctggtgcaggacgtccaggccggtcgctacggcaagaaggccggggtcatccgcatcagcttcgatgatgccgtgtccaacggcctgtacgagcgggtttgcgccatgcgcggcaaggtggccaccgccgatggcaagaaggagtggtacaccgccatccgctcggcctatggcccgcgcaaggccgccatgcgtgaggagctggatgtcatcccgcgcgatggcgatggctcagccatcccctcggtctggatcgatcgggccatgcctgaggcccggcctgtgctgcgcctggtcttcgatgacgacttccccaagcgctcggagaaggaacgcgagatctggtgctcggtctggatcgccaccacactgctgccgacgctgcgcgctgcgatcgccggcttcaccgggcgctgggcgatcggcatggacttcgctcgccaccgtcacttctccgtgatcaccccggccaaggtcggccaggatctgcggcgtgacgtgccattcctgatcgagatggccaacgcacccacccgccaacaggagcagatcctgtgggcgtttctggacgcgctgaatgagggcttccgcggccgctggtcattcgctggcgatgccaccggtcccggtcagaccttgatggaatacaccggcgaccgctacggccgggccgagctcgatgtggaaacggggcgctacaaaggcggcccgatccacgaggtcaccctgtcgcgcccctggtacagcgaatggatgcccaagtacatcgcgttgttcgaagacggcttcctcaccctgcccagggacgcatcgcaggaggatgaccatcgggcggtggagtacgtcgatggcatcccgatggtgccgcgtctggaacggaaggatctgcaggatccggagctggtgcgccacggcgacggcgcgatcgccggcgtcctgatgcagtttgctgcgctcaaccacgtcacctcggtgcccatcgagttccaggcggccggcgctcgcgcctacattggcgacggccgagctgacggcgtggccaccgtcgtgaccgatgatgccttcggcaccgtcagcggcggcaatgattttggaggattcgtatga

SEQ ID NO: 535980 - DNA, 558 bp, Stenotrophomonas maltophilia
atgcctcctgtgagcaagatcgacctgttgccggtcgaggtgcgtgaagagctggaacggcgtctggttgccaacgcattcggcggcagcatcgcgctgtccgaatggctgggtgagcagggctacgagatcagcaagaccaccgtcaacgaacgcgctaagcggatcaagcgccgcctggcttcgatcagcgccagcaccgaagccatgaagctggtggccgagcaggcgccggacaatgccgccgagcgcggcagcgcgctgatgggcctgctgcagaccgacctgttcgaagcactgctgcagtttcaggaggcggccgaccaggacgatgagagcatttcccccgccgatcgcattgcgctgtacagcaaggcagccaaggccattgccgagctgacccgctcttccatcgtgcgcgaaaagtttgccggcgagatccgccagagggcgctggtcgatgcggccagccgggtcgaggaggctgcacgggcaaagggcctggacgccgagggcgtggagttctggcgcaacaaggtgctgcatggagtcggctaa

SEQ ID NO: 535981 - DNA, 597 bp, Stenotrophomonas maltophilia
atgtttgcccaggctatggccggcatcgacgcggacgtgatccatctgcgcatcgattcgcccggcggtgacgtgttcgcggcccgatcgatgatgacggccatcgcacagcacaaggcgaccgtgatcgcccacgtggatggactggcggcctcggctgccaccggcatctgcatggcctgcgatgaggttgagatcagccagggcgccggtttcatgatccacaacgcctggacggtcgctatcggcaacaaggccgatatgaccaagaccggtgagctgctggccaagatcgataccgggctggccggggactacacccgtcgcactggtaaggatgaagcgcagattgtccagtggatggacgaagagacctggttcacggccgacgaagccaaggaacacggtttcgctgatcgcgtggtggaggtcgtcggcaagaagaaggcatccagcacctgggatctgtccgcctacgacaacgcacctgccgcactggccaaccgtacccccgaacccgacgacggcgccgccgccgccgcccacaaggccaatctgtcgcgccgtctggcgctgctggaacgctccgctgcgtaa

SEQ ID NO: 535982 - DNA, 822 bp, Stenotrophomonas maltophilia
atgccggtggcgggttcacatgggtcccaatggttgagcaggagggcaaagcgtacgttggctttgtacggccctcgtatgcgtctagcggccggtatgcgagcaacacgcgcggctacaagacgcagtgcagtgcgcgacctgaggaaactggctggaaggggggtggcactggcgggaccggatccgtgtgccacaacggttgcgcctatgagggttccgtctatgcgggctctccagtgggccttctattccaaccaacaggtggcacgtgcaccacgaacgatcatcctgctcccaccacgcctgatccgggcgagggcggtggtgacggcggaggcaccggtccgggcgacggtggtggcgaaggtggcgggacggatccgggtggcggcgacggtggcggcggtaccggccctggcggcggtgacggcgggggtggcacagggcctggtgatggcgatggtggcgggaccgatccgggtggcggcaccggacctggcccagggcctggcacaggagagggcggggacggtggcggggcagggccgacgactggacggctgtacaagaagtcgggcaagaccgtcgccaaggtccttgctgagttcaaggctggcattgagggcgccccgatcctgtccaaggtcaagggcttctttggtacctgcacgggtggcggatcgtgcccgacggcgacctgggacggcggccagtatgccggcaagttcgacctggccagtctgtgcagcgggccactgctgcaactgttccagtacgccggcttcgtgttcctcgccggcatgggtgttgtcgccttga

SEQ ID NO: 535983 - DNA, 309 bp, Stenotrophomonas maltophilia
atggccgttccgaccctccagcgttgccttggccaggtgcacaaccgcaagcgccacagcgcccagcacccccagcgaaagaagtccatcggggtgctggtgcaggactgccacatgttctccacagcgtcgcgagtgggggctatccaggtacaggatcctgactccaggcgtgagtacctgatcgaggtgtggatccacaccggcgtgctggtgatctcgcagagcaccgacaagcgctggctgctggaactggacgagattctcgacctggccatcgccgccggcattgatcggggggccatctga

SEQ ID NO: 535984 - DNA, 423 bp, Stenotrophomonas maltophilia
atgctgcgcacgttgaccccggcggcagaggaacccgtgtcgctgagcgaagcgaaggcgcacctggtagttatccacgatgcggacgacgcgctgatcggcgccttcatcaccgccgcgcgtgagtcggtggagcgcaccacggggtatgcgttggcagcagcgacctatgagtggaccccggtcggcgagggccgctctccgctgccgatcgagccggccacgctcgacagtgaaccgggcgcctatccggtgaagttcacgacgacgccggggccgcttccggggccgctgcgcgcagccgtgctgctgttgctgggtgacctgtacgccaaccgcgaggcggtggtggctggctcgcagttggccgagaacccaaccttggatcggctgatgttcccctaccgacgggtgttgccatga

SEQ ID NO: 535985 - DNA, 123 bp, Stenotrophomonas maltophilia
atgcgccagcagatggaaagcctgcagcgcttcctcgtcggtgatgccgaggtaccgtgcgcgaccggtatcggccaggaacgcgtgctccgggccgacacccggatagtccaggccggctga

SEQ ID NO: 535986 - DNA, 453 bp, Stenotrophomonas maltophilia
atgcttgccgcctctgtgcttctcgccgcctgcgggcaccgtggcgactacaacgactacgaagctaacgcagaagctgccgctgccgcagcagaagatgcaaggcaagcgacgtacgaagaatatggagccgacagggacggcgctggggctgatctcagcaatgttgatccttacgccatagaagacagcggaaactacacttgcacgctggattgctcaggtcatgaagccggctttgcgtgggctcaggcaaacgacgtctctgatgcgctggagtgcggcggcacctctcagtccttcatcgaaggatgcgaagctttcgtcgaagatcgccaggagtacgccgatctgcaagcgcaagaagccgcctcacaagcggctgatgccaccggcaatgaatctgaggaatacgaaaacgacggtggccgcttgctcgacgggcgctactag

SEQ ID NO: 535987 - DNA, 702 bp, Stenotrophomonas maltophilia; identical to SEQ ID NO: 500621

SEQ ID NO: 535988 - DNA, 444 bp, Stenotrophomonas maltophilia; identical to SEQ ID NO: 510946

SEQ ID NO: 535989 - DNA, 276 bp, Stenotrophomonas maltophilia
atgacgaccgaaatcacggaaatccttgatcgcctccattcctgcgaagccgcgatcgagatccaccgcggctatctgaaagccatggaatacgcgctgcgggtgtctgtactgacccactccgcacctgagcacttgaccgaaacgtggctgcgactactgccgagcatcgcggccaagcaccgggatgatggcggcgagctattcgccgccgccttccaacaggcccttacagtgctaaccgagcaaatcggcgagccaaacagcaagcgctag

SEQ ID NO: 535990 - DNA, 243 bp, Stenotrophomonas maltophilia
atgagcgcccctgtcgatgtgttgggggtgatggacgttgccgcaacctccattgagctcagcggtggcaatgtcgcgtacctgcgccaagcccgcgccgcagtcgccgaactgatcgaggcggacaagcggatcgccgagagggcgcgcaggaaggccggcggcggctggtggatgatctcgaacgaggacatgaccgcccagcgcacagccctcgcccgcgtgaaaggcggtgccgcatga

SEQ ID NO: 535991 - DNA, 729 bp, Stenotrophomonas maltophilia
atggctgacggctcgggcggcttccgattccccttgcatgacctgaagtcgcggctgcgcgcggacgccggccagccgatgccgaccatcaccagcggcgctggcgcggcgcggccggccggtgcggcccatgccatgggggtcatggcggcgtgtctggaacaggccaacggcgggttctaccagggcgctggtagcgctgcagatgagcccacgccaaccatttgcgccaacggcagctatcaacgtctggtgaccgctcacctaatgaccaacaccagcgcgcactgcggcgccgccgccaccgacccagctcaggccaaccaggcggtggtcgaatgcaccctgagccccgatcaagaagctggcgcgctgcgcgttgcagcgttcctgatgcgctactacggcacgggcggacagcatggcgaactggacgagccgctggcgaccatcaccacgaaggaccggctcgcgctggtcacggtacatctgagcggcgttccgtatgtgatcgtggatatcggactgcgcatgctcaagccgcacgagctgttccgcgcccagggcttcccggccagctacatcatcgatcgcacgcaggacggccgccaggtcagcaacagccgggccgtcgcaatggttggcaacagcgtgagcccgcccccgctgatcgccatcctggaagcgaacattggcgcggcggtacagccacagctggaggctgtttga

SEQ ID NO: 535992 - DNA, 687 bp, Stenotrophomonas maltophilia
atgagcatgctggatggaatcagtcagtgttggccgctcgccgagcgctgccatgtatggtgggaggcttgggctgttgcagttgcatttctggggttggcagttgctgctataggtgcggtgattgcttacttcggagttcttgggagctgggctgctgcctacgccacctacatggcagtcattcagcctcttaagcgccgccagctggaggacagggttgcgatcgacctggcgatggagaacttcgcaggtgagttgatcgacctgcgctacgatcttggcggctcggcatcgtctcttggctggttgcgtgcgggatttccgaacgaagcaaaagcccacgtagaaaggcactctatcccaaacgtttcgatacctagcctcaccccgacccctgagaacaggcaaattgtcgaagcgctcaatcgacttcgacgatcggtcaacgcgtggaacagtcacgttcagaactttgacatacggcctaacccatttaatccgagcgactttgcggagacggagatcgagaggatcaagcgcaggatgcagcacttgatcgcggacgtaagagctgttgccgctgcaatgcgagattatgcaccggcttacgcgggcgagctccagtgggtagcgagctccggagatggattccttccctactattctgaaagcgatcgcccctga

SEQ ID NO: 535993 - DNA, 288 bp, Stenotrophomonas maltophilia
atgaattctgccgttatcgctttcgccgctgctggatttgtagctaccagcctaattttcttcattattgagcttttaggcgattcccgcgagcatgagatttccatacttctatccatcttgctggggggcatcatcatcttcacccccgcccgagatgttgcaataaaaactctcggagacttagcatccaacacagcaggattaatttggtccgtcgtctttctgatcgtgtggaccttaggctcggcctgcgcgtatggactgctgaagaaactccgaacttag

SEQ ID NO: 535994 - DNA, 681 bp, Stenotrophomonas maltophilia
atgagttgctgggccctggagattgattggccagtggtcacacaggggttcggtgcaattgcgcagggagctggcgcgatcgtgctggctatagtcggctgtcttggactctcatcttggcgaaagcagttgaggggaacccgcagccaggctctggctgaagaagcgctcagtctcgtctaccgcgtcgccgacggcgttcgtcacatgcgtcagccttgggtatgggctggagaaatgcggagggtcgaaagggcagagggggagagtgaagcggatttcgatcaacgcaaagaatacggagtggtggaggtgcgctatcaagcgcatgccgatgcggccgcacaactggcggctatccgattcagggtacaggcggtgctgggcgaggacgccaagaggtcgatcgacgctgtcctgaatctactcaccaaggtccggaatgaagtcggcgacgcagttcggcacaaacgcgtcatgcttcaccaggcggacctgatgcggaggttccccagcgacactacaagcgatgcatacgaggacgcaaaacgccgcctagttgaatccgaacggtggatccaagcgcagctgcttggtcaagatccagccgaagagatgctttcgaaagcactcaaccgagttgaacgtgcgctgcgggatgcggcctcgctaaagccatag

SEQ ID NO: 535995 - DNA, 270 bp, Stenotrophomonas maltophilia
atgaacacttctgaccgccttcccgtgcgctaccacgtgcacctggacgtcgccggcgcattgatcaagatgaccgacaaggagttggacggactcttccagcgcgttccggccggggagccgctgaccgcgactgaagcccgccgggtgctgaccgaccacctagccgacggccgccgcgtcatccctctcggtgcctgcgaaggcttcgactacggcggcaccggttgccctggccatctggaagcgccagaggtgccccatggctga

SEQ ID NO: 535996 - DNA, 453 bp, Stenotrophomonas maltophilia
atggataccgccaacgatctgcttgacaaagtgaaggccgcttgcaacttcccgtccgacaacgttttggcgcagaagatcgggcttacgcgagcgatggtcagttcgtggcgacatgggcgccatccgatccccgatgagcgaattgcgcagatgtgtgccttggcaaagctcgatggacccacgtggattgccatgctccacgccgaacgtgcgcagactgcgaccgaacgtgctttgtggcgtctcatgctggacaggctgagcgcggcggctgcggtcgtcgcgctggtagcgctgtcgttgccgagcctcggaaacgcaaaaaccgcccaaaataaggcggttagcgagggtctactgacccattctgtatattatgttcgtggcatctgggccagactggcacggaacttgcctcgacccctggccctgctgtggcatggagcctga

SEQ ID NO: 535997 - DNA, 231 bp, Stenotrophomonas maltophilia; identical to SEQ ID NO: 504203

SEQ ID NO: 535998 - DNA, 135 bp, Stenotrophomonas maltophilia
atgttgagtgcatctgaggctctcgagattctggccggtctctcggcaaccatcggcctgatcggtgcggccaagctggcaccggccgcaatctcggtcggcttcaagtggatcaagggcgcgatcttcggttga

SEQ ID NO: 535999 - DNA, 297 bp, Stenotrophomonas maltophilia; identical to SEQ ID NO: 504372

SEQ ID NO: 536000 - DNA, 234 bp, Stenotrophomonas maltophilia; identical to SEQ ID NO: 504373

SEQ ID NO: 536001 - DNA, 285 bp, Stenotrophomonas maltophilia
atgccgtggttagctgcgttcctcgttcaactcctgggcaactctctggcccgcgtcctcactggcgcggggcttggcctcgctactggtgcagcgctgctgccactggtcaaaggtgccctcaacctcatcactcagaagtggtctggcattgccgccgatctggctaacgtcatgctgatggccggggcaggggaggcaatcaccctcatcggctctgccatcgttacgcgggtcgtgatcgacgcaggcaaggtcgccgtacagaaggcagcgtccaaatga

SEQ ID NO: 536002 - DNA, 1218 bp, Stenotrophomonas maltophilia; identical to SEQ ID NO: 504374

SEQ ID NO: 536003 - DNA, 207 bp, Stenotrophomonas maltophilia; identical to SEQ ID NO: 504375

SEQ ID NO: 536004 - DNA, 2085 bp, Stenotrophomonas maltophilia
atgggcggtaagagcaagaagaccaccgtcggcttttggtacaagcccgccttccatgccggcctcggcatcggtcccatcgacgctttcctgcagttccgaggcggcgacaagcccgcgtggatcggagagctgacctccagcggaaccatcagcatcaacgcgccgaacctgtggggtggcgagaaagatcaaggcggcatcgtcggcgcagtggacgtgatgttcggcgaggccacccagcagccgaatgcctacctcgcggccacgttcggcagtcagcagccggcctggcgcggcctggccacattggtgttcaagggcggcaagtacggggcgatgaatccgtatccgcagaaggccagctacaagatcaggaagacgaagaagggctgggacaacgacgcctgctggtatccggagaaggccgagatcgccatgaaggcgccggcgtccgcctcgctgtacttcgccctggacctctccggctcgatggatgaggttgccagcaacgggcagacgcgcctcgccgtcggctcgcccgcgctgtggggcaacgagctggtgcgagtggacgcgctgaatgtcggcaccggcaccatcaccctgggccgcggcgtgggcgacaccgtccggcagccacatgccgctggccagcgcatttggttctacgccgaccacgcggctgccgacctgaccgagtacacggacggcgagagcatccaggtcaagctgctgaccaacacgcccagccagcagctcggcctcagccgggcgacagcgatgggcgtgacgttcgaccagcgccagttccgcccctacgcgcctggcaacctgcggatcaacgacgatccagcgccggtacacgtcgagttcgagttcgacgtgacctgggcgcatcgtgaccgaatcgcgcaggccgaccagctgatcgatgcgagcatggcggacatcgggccggaggccggcgtcacctacaacgcacgcttctacctggacaacgtactgaaggcgaccgagaccggcatcgccggcaactccatcagcggctacagcgtctccggcaatggcacgctgcgcgtcgaggtcgaggccgagcgcgacggcctggccagttggcaggcggccgccgtggagttcgactacatcggcgccgtccagctcagtggcacgctgcccaacgcaaccaggaacgagccgtacagcgcgagcctgacggccatcggcggggcgacgccctacacctggagccttggcacgggcgcgccggcggagttctccatcaatagctcgacgggcgtcatttccggtacgccgacgaccaacggcacgtacaccttcgacgtgacggtggaggatgccaacgccaacaccgacaccagctcccagaccatgaaggtcgaggacgacatctactggtcgagcgtgcgctcgctgcttcacttcgacggcgtggacgcgagcactaccttcactgatcagaagggtaaggtctggacggctgtggggaatgcccagctcgatgacgtgcagtccaagttcggtggaacctcgctcaagctggacggctctggcgactacatcaccacgccctatgtcgctggccacttcaatccggtcaacgactttacccatgaagggtggtactacctggcagcgtcgaagcgacacacgattttcagcgtcaagtcgtcctcggccagcggcaacggctactacgttgcgatcatgccgaacggaacggtgctggtggtgttcggcacttccagcggcttccagaccttccagacggtcaccacaggcggaaacccgactgtggcgctgacggcgtggacccatgtggcggtgaccaagcaaggcagcacggtgcggattttcatcggaggtgtgctcgctggcacgatgacgttgaccggaacgcaagcgcccgagaccagctcgctgcccaccatcggacacgactacacggacagctcgcgccagctcaacggctgggtggatgacttccggtacacggatggggtctgccggtacaccgcgaacttcaccccgccgacctcggcgtatcccaacggtggcgtctga

SEQ ID NO: 536005 - DNA, 408 bp, Stenotrophomonas maltophilia
atgaccgtggcagagcttccgcagtccgtcttccagcatgccggcctggcgcacctggtgggcaacgctgcggtgttggccgttgtcggacctcgcgtgatgcgcgcgctcggctgctggaggatcgcggccctgttcctggtcgccggcgtcgccggaaatggtgttgccgcgctgctgctgcaccgccaggtcatcggtgccagcggcgcggtcgcaggcgtcatggctgcgtacctggtgctgttcccacgctcgcgcctggcgctgctgatcagcctgtggatcgcattgcagttcgtgttcgcaatggccgccttcgacttcggcggcgtcgcctggccagcccacatcgtgggcgccgcggttggatcgctgggcgcagtcatggcccgagcgacgaaatga

SEQ ID NO: 536006 - DNA, 441 bp, Stenotrophomonas maltophilia; identical to SEQ ID NO: 497399

SEQ ID NO: 536007 - DNA, 654 bp, Stenotrophomonas maltophilia
atggagcatatgttttacgttgacgagagcggcgacttggggtggtcgttcgagtcgccgtatggctcaggtggctcgagccggtatcttgttatctcagggctatcaatgcccattgctgacgaccatcgcccggagagggtgatgaagaatgtttacaagggcagcaaatgggatcataagaaagagaagaagtggatccgggcccctgagaaatctcgttctcacttcgttcaagaagctattcagctgtgcactaagtttcctgctattcagtatcacgccattgtggtgaaaaagcagaaagttgctactcaccttcgtgatgacggtaacaagctgtataactacatggtcaagctaatgcttgtggacgaaatggccaagcacgcaaaggtgaattttatccctgacccgcgttcgataaaggttcaaagcggaaatagcatgcatgattatttatcgatatgtctaggtttcgacttgggagttgctacgcgtctggtgacgcagactattgaaagtaagtattcaaaaaaccttcagtttgcggattttatttcaggtgtagtgcactctcatttcgaatttggtcgaagtgatcactttaatttgttgtcgcctaaaatgaaagttaagaagctttttttctga

SEQ ID NO: 536008 - DNA, 363 bp, Stenotrophomonas maltophilia
atggtgatcagggccgtgcagatggcggtctggcagcgccaaggcagccatccactgatcctgcactccgaccgtggcagccagttccgaagcggcgactaccagcgttacctggcggccaacggcttggtgtgctcgatgagcgcggtgggccactgcggtgacaacgccgcgtgcgaaggcttcttcggcctgctcaagcgcgagcgggtctaccgcatgacctacccaacgctcgatgccgcgagggcggatgtgttcgaatacatcgagcggttccacaacccgaggatgcgacgaagggtcgccaggcaagaccagaagttctcagcccttttacaaccgtccgtgatttcggggtag

SEQ ID NO: 536009 - DNA, 363 bp, Stenotrophomonas maltophilia; identical to SEQ ID NO: 536008

SEQ ID NO: 536010 - DNA, 714 bp, Stenotrophomonas maltophilia
gtgtacgaggagggcggcaccaacgtttggaaggcgctcgcgctcaaaggcggcgtcatgggcgtggtcgggatcgttggcgccgtggccttcatcggcttcttcctgagcggcggcggactggtaccggaggaagagaagtcaaaggaaaagcagctgcatggcgtcactgccgcggccccggcagatcaaagcacgattccgaatcttccgggtgtgcccgctcccaaggcggcgcctgatcctatggacgcgttgacgccggaacagcggtatgtggcgcagctgtcgaaagggaaccgtatccgactggcgctcacagctgtcttcggcgaccgccaggtcggcatggtcgagtgggtggacagcagtaacaacacggtcgatcagctgacgttcgacgcgttaattgcgctggggttccgagtgcgggtgttcgcctatggcgccaacatcagcgccgacaattacaagctggtcgctacgccatggccgcgccaagctccgcgacgggaggaagatccgacgctctaccgcctggacaagccggacgctggcaccggcattgcgaccgcagggagtgaggccggtgctggcgtccgggtcatcagcgcacaaggggcggtttccactgccggaggcacgctggttcgcgtcggtgagcggcccatgggaacatttccggaatcgaagccgtacccacccagcttctga

SEQ ID NO: 536011 - DNA, 426 bp, Stenotrophomonas maltophilia
atggtttcgggtacaaacggcgagggtcgcctcgggtcgttgttggtcatagaagatgactctgacctttcagggatgttgaaggaaatcctgacgatgcagggttatgaggtcgatgtggtcgcctcgtcatccgaggcgttcgagcgcatagcgacccgagcatttcacgcggcgattttagacatccagacgcaggacggagcctcggtatccgtcgccgattaccttctgtcgcaccggattccctacatgttcgcgtccggagttcctaacccacagttacctgacgcacaccaatgggcgaccttcctccagaagccgtacagcatcagagaactcatgagcgcgcttgataggactcgccaaatcggtattcctgttttggcgcgtccatgcgccagtagctcattcccgctgttttag

SEQ ID NO: 536012 - DNA, 261 bp, Stenotrophomonas maltophilia; identical to SEQ ID NO: 529050

SEQ ID NO: 536013 - DNA, 252 bp, Stenotrophomonas maltophilia
atgcagtcactggccgtggaagggggctcggcggcgcgcacaggcgatgcgctggcggacgcggcaacggcgacgagcagggcggtcaacgtgagcatgttcatggcggggcaggggaatggcgatccggactggatcgggtcccacgatgccgccacggatgaagatgcgaatctgccgcaagcagggctgaccgacgccacggtgcgttcggtcacgatgacctccggcagggccggattgcacccatga

SEQ ID NO: 536014 - DNA, 282 bp, Stenotrophomonas maltophilia; identical to SEQ ID NO: 510994

SEQ ID NO: 536015 - DNA, 1389 bp, Stenotrophomonas maltophilia
atggtggaaaggaattttttaaagaatgaggaattggctaagttcatcgactcggctacgccggatcaactgaaagaacttttcagtgttcaaagtgttaacgcgccgatagaagttgagatttccaaaggcttagagtttcacggaacggcatttagttatgcagtcttctcaagcaaaaccgttgaaagtcatatccaggctctaatcgaatgtggggcagacttgaactttgagcaaaataaagaccagttctcacgttcacagttgaggattttagatcagtgggaaacaggtggaagtcaatcatttgatgtgcttgaggatgcgagccccggcaagcgcgaaatcataaaggaggcatttgatagttatcgaagccgagagcgtagcgttgatgaagtttatgaaatgctctgcaaggaagatttgagcgtggttgcaaaatactttgaaactcatgatccaaacgaacaggtcacaatggtgttgaacgatgaaagtatgatctttaccggcacttttaccggacttgcagcgttcaaagatgcagttcctggggaagcgttcaaagcactaatgcaagctgggggcgatcctaatgttcggtgccgacttgaggggcggtatagcaaagatgtcttcgatgagatgactgttactgagttctgccactctgctcaaaagatcaatgatgcattggatcatggtggggttccatctgatataactgtggattcagtgatgtacgtcatgaacaaatataaagatgttttgaatcttgagttgcgcttggttaatgattttcctgatttgatcgagtcgcgggatatgcatgttattggcaatccaaaagctgttgctgagatggtgttgatggggcacgatcccaacgtcttaaacgacgacggcgacaatgtgatgatgggcgcaatccttcgcggcgattacgaaaaagcagatgcattgcaacaagtgggcgttccactgactgggcctaaaggtcaacgtccaatggacaccgtgagcgaacgctacaatgaactgcaaagtcatattgggcgcatacgttatgcagaactttcatctggtgaaaatttgtgcatgcgggcgtttgactatcttgtcgatcgtagtgaagatccaagcggcgacctttctgcgtacatgaagattggtagtgatgtgaaaggggttcatgtggtcaagttgctggatcgcggagcgatgatgaattcagaaaatcagttcacctactttaataacgagtcaataaaagaaaaagacaaagaagcggttcaggacgcattgaacagacaacaacgggatacgatcttggcggaagtcggtgaggtttatacaccgccaaccatgaggagaaagatgtaa

SEQ ID NO: 536016 - DNA, 621 bp, Stenotrophomonas maltophilia
atggatgccaatattgtcaagctgaaaaacccatcacattcttctgcgggcaacaggctgctttcgcacggatccaacagccttggtgatggcggccttgtcccagcgtgcttcatgctccaacagcagtttctttgctttggggatcacagcaatgtccgatggcctcaaaccctcgttgttgcggatccggggatcggccttgcgttgcagcagccagttcattcgcgtggtgtaatcagtctgcgccaaatagtgcagcgctgtatcgccatctttgtcctgcgcattgacatccacgcccaggtcaataacgcgatgaatgagccggcaattcactgtctcgtcaatcaaccaatgcaaaagtgtcccattgaacgtggtgtcagtggctttatccagtgggttgtatccattgtccagcaacacctcaacggaacgagtgtcgaaacagcaatatccacaactgagaattccagctcctttgtgatctttggcgttgacatccgctccggcctgaacgaaagcttcaacacgcgacgccttaagccttctctcatggaacaagggtgttcggcctttgcgatcgcgcgcgttgggatttgcgcccttgctcagtag

SEQ ID NO: 536017 - DNA, 312 bp, Stenotrophomonas maltophilia
atgaggcaatacctttatcgcgtaactctggagcaattgacggattcacatggcgtccccagtgaacgcaagcctctgcagtttaaggttgggaatcatgacgacatcatctctgtcgtgacgtggattcgcagcagaggtgatttcagcagccaggcagatgcggcggcatttgcggttggcctgaagctgtttggcggagccatcctggcgaacaaagacaacccgcttctattttcattcctgccgcagctatatcagtttgtcaaggatttgaaagcaggatcaaccgacagccaaagaaaagactga

SEQ ID NO: 536018 - DNA, 279 bp, Stenotrophomonas maltophilia
atgaagaaaatcattccgttcttgctcgtgaccgccttgtctgcttgcggccaatccgaggcacctcagaaggccgccgattcggagacgaatattccgacggtggaagagctggcggccaaccctgaccagcttaaaggactgcgccaacagtgcaagaccgatcgccccaagctgggcgacatgctgtgcaaccgggtggccgaagccacgcgcaagcgattctatggcgacggcgaaacgccctatacaccgccgaaagagtcgccaaagttctga

SEQ ID NO: 536019 - DNA, 567 bp, Stenotrophomonas maltophilia
gtgtgcagtgccgagttcgcgctggtactgctctgctactacgtgatgaccttgagctactcgctgaagctcaagcgcatcgtgatgatcgatgtggtgatgctggccgcgctgtacaccgtgcgcatcatcggcggcgcggtggcgatcggctcggaactctcgttctggctgctggccttctcgatgttcgtgttcctcagcctggccatgctcaagcgctataccgaactggcgtcggcactggccaatggaaaggaaatggccatcggccgtggctactccgtggccgatctgccgctggtacagtcgctgggcgcggcggccggctatatcggcgtcctggtgtttgcgctctacatcaacagtcccgagagcctcgagctctacagcaaccccaaactgctgtggctgctgtgtccgatcctgctgtactggatcagccggatgtggatcgtctctcatcgcggtgacatgcatgacgatccgatcgttttcgcggcgatggaccgtggcagccagatcgtcatcgcgctgtgcgtgctgatcgtcctgatcgcgatatga

SEQ ID NO: 536020 - DNA, 1713 bp, Stenotrophomonas maltophilia
atgaacaaccgcgcggagggccgcgctcgcccgcccaccacaagatttcagcgctgtccccaaatgcatgtaatctttgccgatacacggaaggatgagatagaccgcactatgacggcctctgcccaaattgacactaccagcttgctgaccatattgggcgttattgccgcagtctgggcactgatctctcccaccagcaggcttcgcctccgcttttgcatggcttggtgggattgggtcatcggtgccatcgtctttctcctcatccactacctggtatttgctcctgccctggaaaggctcggcctgtactacagcctggggccgtggaaatgggggctcgatagttcgagcgcggtttacctgctccttctctccgttgtcgtctacttcttctggcgaactagatctcccatgctggtccggggaagaatccgcgtctttcgcgaattgattgagagcctgcatctcaccaaacgctatgacgaactggtgctgctggtcgaaccgcagttgccgaagctgattctcctgaccaagcagcagtcgctgattgctggctgggtcgatcgtctcgacccacccaacatcaacatggctgcactcttgcgcggggaagtacctcgcgcaaggccggcttggcggcagcgctggagtaccgcgttgcaatctttgaagtcctggatcttggcgcgtgacgatgccagcacgcaggcccgcgaagtcctcttgaatctggtcacatctcctgagcttaccgtccatctggccgtggcccacccacacttctgcctcaagctccttgaagctgacgaggcgatacgctctgacttcattgaaaactacatggatgcgttgcttgacgcgccaggcagccgcctttatgtggagctgaagaacaatcagaatctgaatggtgggagtcgcctgttccttccgaagaacaatcgactactccatttctttttctccgacgccgctgaggcgatgaagaatggtctcgatagggccattggcgaagcggtgtgccggcgtctggatgaagaccataagctcgccgagaagctcaaccaatcattgggctcctactacgacggaggaagattccgctgcccgatcaatgctggaataacgctctttgagatcatggtccacgagggcatccaccagggcttgcaagaccatatgtggctgcactatttcaggcacttcgcggaaaagatcctcaagcagatgccaatgccgcctgacgaagacgcctaccaagagtggccgacgccatttcactatcttctctatcgcttggtcagtgttaccaccgattgggctgaacaatgtgcgcgcattgatgacgcagagatcccagaggccacgcgcaacgccgatggttttgaccggcacttcatttccaaagaagccaccaagacgctgggttcaatgttgcaagacatcatcccaagtgaaaagatcacagcatcgttcaaaacctacctattggaagttgccattcgcagtcacaacaagctgcagggcaatcgtgaactgtttgacgtcgcatcctcgttcaggaacgccgtgatccggggcgcagaccttccgacagagacctcataccgggttgagcttcggaatgtgttcgaccgtatggaccacaggatgagacacgaagcagcacaattcaaggaagccttggacgggacgcttgcgtga

SEQ ID NO: 536021 - DNA, 1137 bp, Stenotrophomonas maltophilia
atgaccactatctatatcgatgaaagcggccacagcggcgacatgatcaacagcgggaagggctacgacttcaaaggacagccttactttgcattggccggtgtcggacttgaggatgaccatgactgggaagaccacatcagtgaattgcgcagtcgacaccgcattcctccgggtgaactcaagtctaagtcgctcacctcaaagccaaagttctccgccgaagtcatcaatgtcttactcgatcaacgggctcctcttttcgttgagttggtcgacaaacgctacttcatctgcacctgcatcacatcgttccagctcttggctccttgtctcggctaccccgagtctgtggagcttcacttcctcaaaaacaccgccgctgacttcttgcacttccacgcatccgagcgcgtactggacacgtttgtcgcctcctgcttagcgccagaggatgcgacgcttcgtgcttcgttcgccagcctccgcgaaatggccacacagcaaacctatagaggagaggcagcgcaaatcgcccaggggatcgccaacatggttgaggtgtccgaaaccgagtacctggagcaaagtggtactgaagacgagtcctggttgcgctttcttccgcccccggatgtcaacaaacgtgcgaagcaggtctggatgctgccaaacctcacctctttcaccagcatctacgcacgaatgaatcgctactacgggcgtcgattggctggcatccggttggtacacgaccagcagttggaagtggagagcatcctgcgccaaggcaaggcagcggccgagaacctaagtaggaccatggatctcccctacacgccgcagtccgattatcggtttgaggaaaaggccagcatcgattttgctcagtcgcacgaggttatcggcgtgcaattggccgatatcgtggctggagccaccatgcgcctcttccgtgatacagacgctggcatacctgtatcaagtgaactgcgtgaagccgtgatgcgtctcatctctgaaggagatgagcggactggctacggcctcaatcaagtcgtaccaactgcgaatgttcgcaacgcgggcttcggtgcttcagcttccagctctagggcgccgatgggctcgcgatga

SEQ ID NO: 536022 - DNA, 1956 bp, Stenotrophomonas maltophilia
atgaagatcagatccatccatatctacagccatgacggccagcgccgtgacctccggttcaaggtagacggactcaacgtcatcacaggccgctcctccaccggcaagtctgcgctctccgaaatcatcgaatactgcatgggacgctcgtcattcaacgtcccggaaggcatcattcgtgacaaagtgtcttggttcgccgtgatctaccagttcgagaaagaacaggtgctgattgccaagccgaccccgcccggcggaggcgccagttgcagcacggcgatgttgcgaagaggtgcccaattgcaggtacccgagttcaaggatctggcggtcaacactgacgatgacagcattgtcgagctgctgtcgcgcttgcttggaattcccgagaaccgcaccgaagtcgcgcttgaacacagccgaaatagctacgacgcgaacgtcaagcacacgttctactacctgttccagaagcaggggctggtcgccaacaaggatcaacttttctatcgccagaacgagcagtttcaaccgcaggcgatccgcgacacgttgccaatcttgcttggcgtctcctcccacgatcgctacgagctggaatccaagctgcgcttagcgcagcgcgatctgaggatcagcaacaagaaactggagcaggcgcgcgacgccgttgacacgtcgcatgaacaggctatcggtctctactcggaagccaagacggtcggggtcatcggcaacaccgacgagagcccaaatgccgaggggatcattgatgcattgaggttggcgctgtcgtggaagcccgaaaccgtgccagacgacgacggcagccgggtttcgtttctggaagatgagctggcccaactgcgtcaggatcgccgtgatacgcaggcccggattgacgcggcaagacagttcgccaagcgggcgggcggctacgaaaacgaggccgccgaacagatagaccggctggcctcaatcaaggcactgccgaagaaccccgacagcggcgaatggcaatggccgttcagcgagcagaacttggcgctggaatccccggtcgccgtcgtcttgctcaatgaattggaatcgctcgacaaagagttgcgcattgccaccggccagcgccccaagctcgaagcctaccttgccgaactgaccggcaaagcagatgggatcgcaagcgatatcaagcaaaaggaagcggagctatccgcggcgatctcggccaacgaagtcatcgcccagatgggaacccgcaacaacgcggccgcgcgcgtggtcggccgtatcagcctgttcctggaaacgctcctcccgaatgaggatcttgccaaactggaagcagagaatcgccgtctcagcaacaaagttaagcagcttgaggagcagatcggtgctgacgacagcagcgaacgcctgacctcgatcctcaacaacatctccgcacgggtgtcgcgatacatccaaaagttcaacgccgaattcggtccttaccctgcacggctcaacctgccgcagttgacaataatcttcgatcgacccgagcgtcctgtaccgatgggcaggaccggtggcggcgagaaccatctggcctaccacctgtcagcactgctcgccctgcatctattcgcggcgcagaacaatcgtccgattccgcgcttcctgttgatcgaccaaccaacccaggtctacttcccctctgagcaggtctatagggatgctgatggttcggtgcagaagacggaagccgacgccgacctcgatgcggtgcgtcgactgttcgagttgttgctgaagttcacccaagaggatgtcccaggcttccaactgatcgtcactgagcatgcgaacctgcgtgagcaatggttccaggatgcgctggtcgaggagccatggacaaaaccgcccgcgctggttccggaggaatggccgacagaagcggcgaactga

SEQ ID NO: 536023 - DNA, 1224 bp, Stenotrophomonas maltophilia
atggccgaggcgcccaccgataagttttcagccggcgagcagggtcttggatatatctaccaggcacgtctcgccctgctgcaactgcttcaattgcctgaagacactgccatcttcctagaaaaggacgacgacctcgactttatcgacggtagcggtggcaagtccctggcctcactcaaacacaaggcgatcggcgataggttgaccgacctgtcgaccgatttctggaagtccgtaaatatctggctggcgcggtacaaacgggatggccgcgctgcatcgaacatgcggttcttcctgttcaccactggcacggtgtccaccggctcatttcttgcccttcttctccccgaacagcctgtcgcctcccgtgatgcggtaacgctcaccgaactggccgatgcggcgcttgccgaatcgacatcgaaactcatcgcgccgatagccgcagcgttcaatgaactaagtgaccccgaaaagcaggattttctcgaacgcatcctgatcctcgatggcagcccgcgcataggcgacattccggcgctcatcagagacaagcacatgcggcccatccggcgcgagcaccgcgagtttgtcttcgagcggctggagggctggtggaccgatgccgtgatcaagcatttgaccggcgctaggccggaagggatcttcggctacgaagtatcggacaagctctcaaacttcgcagaggaatacaaggcggacaacctgcctattaccttccgcggaaagctgcccgccgatgagattgacactgatacagatccgcgcctattcgtggcgcaactgcgtgagatcggtatttcttccaatcggatcaggagcgcgattctggattattaccgagcgttcgaacaacgatcagcgtgggcgcgagagaacctgcttgtgttgggagaggtcgaggagtacgaagatcgcctcaccgatgagtggggccgctacaaggatgtggctttcgagaagctgaaggacgatagcgcggaagaagcactatgcgaagccggcgcgaccctctacaactgggcggaatttgaaactgggaagatcgaatctctacgcattcgtgcacgggtgacggagccctatgtccttcgcggcagcttccacatcctggcggactccactcccgaacccaaggtctactggcatcccagattcctcgaccgccttggcaaagtcctgggggtggcctcgtga

SEQ ID NO: 536024 - DNA, 180 bp, Stenotrophomonas maltophilia
atgcgccattccatccttgcccactgcgtcctgctcggccttgccttcgaggcagaggccgcctgccgacagatcggcggcgatgcctggatcgatcttgaaccggaggtgacctttaccgagcagcccgaccgctggttggggtatgggggggggcaaggtgcaactgctttgcgatga

SEQ ID NO: 536025 - DNA, 1395 bp, Stenotrophomonas maltophilia
atgcgtaaacaatttgcgggctactttgatccaacttccgcgcagcttgaagcgttgtggggtgaatacgacagcgtaatcgcgctggacactaatgttcttcttggtctctaccgcatgccttctgaaactcgcaaggaggtgacagaactacttgctaggctgaaggaaaggatatgggttccgtatcacgtgctcttggagtttcatcgaaaccgcattgaggccatgcgcagtgagtatgcggcgtcgaagcaactcgggaaggatgccaagaatgcgtacgacgtctttcgtgctgcgatttcaaacgagcgcgcgcgtgaacgtgcctgctgggcgcaagtctccgagaagctagaggagatggataagaaggcggatgagctattcaaagtcaccaagacggaaagtagccattacgtttccccgaacgaagtggatcccgtactgacctttgtcgagcagttagtgaatggacgtacgggagctaggcctgtcgatcaagccgcggttgatcgtgcagaactggccgccgcagagaggttcaagctggggctggggcccgggcatcgagatcaggacaaggctggaaacttctacgtgttcgatggtctccggtacgatcctcagtatggcgactacatggtgtggcgtgagctgctcaagcacagtgctgagaacaacgtcaagcgactgatgcttgtgacttctgatgtgaagccagactggtggttggagtccagatcaatttcggggatgcggcctcaaccggaactagtaatggagatggtccgcgaggccaatgttgactgtttctggatgtatacgctgtccgatttcatcaagaacgcgggaagcttccttagagctaccgtgacccagaaggccatcaccgacgcaaagcaggcggaatccgcatcgcgacggtcggaggcggctgaatttcaagcgatgctccaagcgaaatccgttcggcagctcgatgtcgagatggtcgtcgaaaggatgtgcaacagagtggttggtgctcacggcgggattgcatacggcttcaaaacatctatagaaggcagacccggtgcactcatagcagtgccgggaatcatgggcatttttagccctggaacactcagggaagtgctgcgtagggcattcgacgatatgaggcgtcatggggccttcgaggtgttcgagatcttcctgatgttcccgcaaggactcgctgagatcaccattgaaatggctctcgacgcgacgaagaaaagcctagctgaggttcctggtgagtactacagaggagacattgtcgccgcacacttcaccgacgcacagcgcacggaatttgagattactcactggaggagtgccgctctaaatcaagggtcgaggtga

SEQ ID NO: 536026 - DNA, 783 bp, Stenotrophomonas maltophilia
atgctagagactgtggaggccactcgctttatcaaggagctgggaagtggtaggaacctgccatggcttttggaggcggagcgcgcgaacggagatgttgtcgaagtcgtcgcaaagttgggctctgctgaatgtggagttggtggcttagttcgagaggcatacagctctatgcttgccgccgatctaggcttgccggtgtctgagccctttgttgtgaacctaggctcggactttgtgagtgaacttacagcgatccagcagggaagatgcgctgggcaccagacctgttttggttgtgagtacgtcccacacatgctgcaggtgcaaccgggctcgactcttcctggctatctgttggaggctgctggtcatacgctggccttcgacgctggagttttgaatgctgatcgtttgatgtctaagccaaactgtctgactgacgggaaatcgctgcttctcatcgatcatgaactctcactcaatctgcacggccgtggcttcttgtttcacgatccatggacagacggtgctcttaatgtcatgactagtggcccctctacccacctcttctataacgcagttcgatctagtatcccgatgaagtctcaattcttcgattccttgggcaaggtcgcgccctctcgggttgaggagtatcgctctgcgattccctccgaatgggacattgatggcttgtcaaaaggaatttcagacttcctattagacctgatcggtaacgcgaaaggtttggagtcacagatcaaggcaatcacctcatga

SEQ ID NO: 536027 - DNA, 846 bp, Stenotrophomonas maltophilia
atgagcagagcgaagtactcagccatcgtcctgcgatatgtacacgacgcggtctcggccgagttcgtcaacattggccttttgtttgtctgttctgagcagaatgtgatcaggttctcggtgctcccgagaaccaagagggtcgttgagtttttcccgggcgctaaagccagagtcattcgagctgcactaaggcaggccacgacatcggctaagccgtggctcaaccgttcaatccaagcatcaggattgcctgacgagagggccgaagcccttagggaaatggcgtacgcagtagttcctagagatgacagcgcactgcaatggtcggaagtctttcacggactatcacatgatgcgtctgcggcttttgacagactcttcgaacggttagtgcttaggtatgaggatggtgctgtacagcataaacgtaccgacgatcaggtatggcgaacctttagcaaggtgcttgagaagcgaaacgtttttggaagattgcaggaatttgaggtatccgccgagctggagtccgtgaagttcaagcatgctcttaagaatgggaagtggcacctgatggagccagtgtcctttgatcttgcgtctgccgagagcattacggacaaggctaagaggctgttgggccagatgactctattgaagggaagtgacactgacttccgcctttacttccttgttgggcagcctgagggggacgagggccaagaggcatactcgaaagcgctgaggatccttggggaaataccctgtgaaaaggtgatttaccccgaatccaaagctgaggaatttgcagccgacctggttcgggtcgcagcttcagcgcactga

SEQ ID NO: 536028 - DNA, 267 bp, Stenotrophomonas maltophilia
atgtcagaagcaatcgcagaggtactgcagcgccttgaagcctgcgagacgtccctagaagcgcatcgcggctacctgaaggcgttcgagtacggacttcgtgcagcggtaatcacccaccccgggccggaacagctttgccgcgtctggacgcagttgcttccagagattgcagagaaacacgccggagatggcagcgccatctacacggcggccctgcagcaagcgctcgcgctgctgactgatcagatcggggcaccaacctag

SEQ ID NO: 536029 - DNA, 291 bp, Stenotrophomonas maltophilia
atggaagaattgccgaagcggaagaagaagcccagccgcaaagacggcttcccttggaagagcaccattgccgtcgtggtgatcctcggcattgtcctagccgcgtttgaaatgggacgagtcgaacgcgagtaccgcgccaaagccaaccggcaggcccttgaagccatgcacgctgtgcttcagcgggaagagaacgtcggccatccggctgcggacacgatgcatgcgggcgatgctgagcagaatggtcaggaaacagcagcaggttcctctaccgaagaggaatga

SEQ ID NO: 536030 - DNA, 525 bp, Stenotrophomonas maltophilia
atgtcgatccatcaactgaatgtctgcggctcagcacagatgctccgggccctgcgaggccaactggaaaaggcagacgcccatgcgcgggccgttggatatgatccatgcatcctgctgcaggcgcgcttggcaccggacatgcacccacttgccaagcaaatccaattcgtttgcacccaagctcgtgaagtgatctgccggctccgtggcaagccgctgccgacgctacagtcgcccagcgacatggaccaggcaaaggcactcatagacgaaacactgagctacttggctaccagcgaaccggaggagatcgatgccggggcgtcgcgtcacgttgcgatcgaactggccgatggcctcgccttcgatatgaagggcgaagagtacgcagcgaactgggcaacaccacagttctacttccacttgatggctgcgtactgcatcctgcgccataatggcgtccctttgggaaaggctgactatgtgccgcacatggtcgcctgggtacgaaaggaagagtag

SEQ ID NO: 536031 - DNA, 606 bp, Stenotrophomonas maltophilia
atgcctggctcaaaggggttgccggccagcggccggcactacccgaagcgcgaatccggtcggggacaagccctggcagagccggccgctggccggctgctctcgatgcccggttcaatgggttgccggccagcggccggcactacccgaagcgcgaatccaggtcgggaacaagccctggtagagccggccgctggccggctgctctcgatgctggattcaatgaggttgccggccagcggccggcactacccgaagcgcgaatccaggccggggacaagccctggtagagccggccgctggccggctgctctcgatgcctggctcaaaggggttgccggccagcggccggcactacccgaagcgcgaatccggtcggggacaagccctggcagagccggccgctggccggctgctctcgatgcccggttcaatgggttgccggccagcggccggcactacccgaagcgcgaatccaggtcgggaacaagccctggtagagccggccgctggccggctgctctcgatgctggattcaatgaggttgccggccagcggccggcactacccgaagcgcgaatccaggccggggacaagccctggtag

SEQ ID NO: 536032 - DNA, 870 bp, Stenotrophomonas maltophilia
  misc_feature (421)..(438): n is a, c, g, or t
atgcgccatggtgggtcgatcatggggtattggctgtcaggccatgcctcgatgggtgttgggagatgtctgaagttgaatgaggttgccggccagcggccggcactaccgggactatggattgccggccagcggccggcactaccggggctatggattgccggccagcggccggcactaccggggctatggattgccggccagcggccggcactaccggggctatggattgccggccagcggccggcactaccggggctatggattgccggccagcggccggcactaccggggctatggattgccggccagcggccggcactaccggggccagggttgccggccagcggccggcactaccgggactatggattgccggccagcggccggcactaccggggctatggattgccggccagcnnnnnnnnnnnnnnnnnncggccggcactaccggggctatggattgccggccagcggccggcactaccggggccagggttgccggccagcggccggcactaccgggactatggattgccggccagcggccggcactaccggagctgtgggttgccggccagcggccggcactaccggggccatggattgccggccagcggccggcactaccggggctatggattgccggccagccgccggcactaccggggccatggattgccggccagcggccggccctaccattgccggcaggcggcggtcggggctcagccgcgcagggtggcgccgccgtcgacgtacaggtcgctcatggccacatgcccggcctgctcggagagcaggaacatcaccgagtgcgcgatgtcctccggggtggcgagtttgcgcagtggaatgccggccttgtag

SEQ ID NO: 536033 - DNA, 678 bp, Stenotrophomonas maltophilia
atgctctggtgggtgccgaccttggttggcacgctccatcggagttcattaccgctggcggattgtgccgaccaacggtcggcacctaccaggagcaggcatcgcagggccattgattcggtgccgaccgttggtcggcacgccctgcagaactcatcgctgccgacagattgtgccgaccaacggtcggcacctaccagagcgggcatcgcagggccattgatccggtgggtgccgaccgttggtcggcacgccctgcagaactcatcgctgccgacagattgtgccgaccaacggtcggcacctaccagagcgggcatcgcagggccattgattcggtgggtgccgaccgttggtcggcacgccctgcagaactcatcgctgccgacagattgtgccgaccaacggtcggcacctaccagagcgggcatcgcagggccattgattcggtgggtgccgaccgtgggtcggcaccccgtgcagaactcatcgctgccgacagattgtgccgaccaacggtcggcacctaccagaagcaggcatcgcagggccattgatccggtgggtgccgaccgtgggtcggcacgccctgcagaactcatcgctgccgacagattgtgtcgaccaacggtcggcacctaccagaagcgggccatcgcagggccattgatccggtga

SEQ ID NO: 536034 - DNA, 1347 bp, Stenotrophomonas maltophilia
atgaagcgtgcagggctgggcagggcaatgggtgtggttctggcgttggcagcgctgccggcaatggcggcggccaacgtacagcagttcagccacgggcggttcgagcagattccggtgcacatgccggctggcacgccgcagcgtgtggtgatctggttccatgaacccaccgccggtggtgataccagccgccttccgatcgaggccctgcgtgccgatggcgcgatggtcgctgccgtggacatcgcgcatctgcgcagcgtgctcaagcgcgaggggaatccgacctgttcgttcggttccggcgacgtcgagaacttctcgcgctggttgcaggcctccctgcacctgcctggctaccacctgccgctggtcggtggtgatggtgaaggcgccgagatggcctacacgctggccgcacaggccgacacccaggtattcgccggcctgctgaccaccggcttctgcccggatcaccgccacgagcgcatggtctgcggcgatggtttgaagcacaacaagctgcagcctgccgagttgaattccccgtggctgagcgccgccggcgaccatggctgcaaggttggcgaggccagccgcttcgtgcagcaggtggcgatggcacgcgagttcaagcgcaccgcgcgcggcgatgcttcacccggcctggtggcggcggcgcgggtgatcggcgcgcaggccggcgtcagcctggcaccgccaccagccgcgctgaagggcctgccgatagtggaagtaccggcgaccggcagcggcgacacgctggccgtgttcgtttccggcgatggcggctgggccggcctggacaaggacgtagcatcgtcgctcaacgagcatgacgtggccgtggtcggcatcgactcactgcgctacttctggagcgaacgcacgccgaagggatttgccactgacctgcagaagatcatcgatcactaccgccagcagtggcatcgcgacaaggtgatgctgatcggtttctcgcagggtgccgacgtgctgccggccaccatcaaccagcttgatgccggcacccgtgaggcgctggaccgtatcgtgctgctgtcggtgggcaggaaggctgactttgaattccatgtcagcaactggctggggggcggcggtgacggcctgccgatcgcgccggaagtggcgaagctgccggcggcgaagaccctctgcgtgtatggcgacaaggatgacgacgcgctgtgccccggcctgccggccaacgacggcgtgcagaaggtgaagcttccgggcgaccatcacttcaatggtgattacgaccgattggccgaagtgatcctcaagggcggggcgtag

SEQ ID NO: 536035 - DNA, 867 bp, Stenotrophomonas maltophilia
gtgcgaatgtcccccggcgccggcctgcggccgtcacctcctcctttacttcgcacgcaagcccctctccccccgcgtgtcaggcatccgggcggctttggcactggctcttactatccgcaagccgagccgcagcgccggtggcaggcgtttggacaaagtaaaggaggaggcgaccgccgcaggcggacgacgggggacatttgtccagacgcctgccacctgcgctgcggcccagaccttcgcggtggcagttgccgtagacgcaggcgtggtcgagcgctggagggagcgggggctggctgcgaatgtcccccggcgccggcctgcggccgtcacctcctcctttacttcgcacgcaagcccctctccccccgcgtgtcaggcatccgggcggctttggcactggctcttactatccgcaagccgagccgcagcgccggtggcaggcgtttggacaaagtaaaggaggaggcgaccgccgcaggcggacgacgggggacatttgtccagacgcctgccacctgcgctgcggcccagaccttcgcggtggcagttgccgtagacgcaggcgtggtcgagcgctggagggagcgggggctggctgcgaatgtcccccggcgccggcctgcggccgtcacctcctcctttacttcgcacccagcccccgctccctccgcgtgtcaggcatccaggcggcccaggcagtggctctcgactacccgcgctgcggcccgaacgctcgcaaagagagtgatcgaggctcaacaaaaaaaccccggcaaatgccggggcttttcatttggaacggcgcaggcgccttacttcttcttcggcatgtacagatcggtgatcgtgccgtcgtag

SEQ ID NO: 536036 - DNA, 141 bp, Stenotrophomonas maltophilia
atgctgatgctgatgctgatgctgatgctgatgctgatggtgatgctgatggtgatggtgggtgccgaccgttggtcggcacgctctcgccctgcgcgaaatgcatccacgcatggcgtggatctactgccggctcagtag

SEQ ID NO: 536037 - DNA, 1893 bp, Stenotrophomonas maltophilia
atgctcgggggcaagacagtggcggacaagtactgcgatctggtcatgaaaggcggcatcaccagcggcatcgtgtaccccaatgcggtactggcgctggcgcgcgagtatcgcttcaagagcatcggcggcacttcggccggcgccatcgccgccgccgtggcggctgcggcggcctgcggtgatcgtcgccagcaggccggcgagcacctgcccggcgatgcaggctatggcgggttgtcggcggtgtcggcgcagctgtcgcggcgcggcttcatctacagcctgttccagcccgcacgcggcgcacgcgcggcctatcgcctgctggtggtgctgaccggcaatgccagcctgccgcacaagctgctgtgcctggccgttgccgtgttcgagatcgcgccgctggaagtgctggtgtcgctggcgctgctgctcggcctgggctggtggggcggtggttggagcggggtggcggccacgctgctgccgtcgctgctgtgtgcgtacggtgcgggtgtggccggtgccgcgcttcgtgtggcacgcgtggcgcgacgcaatctgctgggcctgtgcagcggcctcggccgcgatgcacgcacaccggcactgaccgagtggctgcacgaatgcctgcagcagttgtccggcaagccgctggatgcaccgctcaccttcgccgacctgcacgatgcgccgcgctatgccggcgagccggacagcccgcatgcgatcagcctgcagatgatcaccacctgcgtgtcgcacaacgagccgcgcacgctgccgctgggcggcgcgcagttctggttcctgcgcgaggaattcgagcagctgttcccggccagcgtggtgcagtggctggtgacgcaggccggcccgccgctggaggtggaagggcggcagtactaccacctgccgccgggcccgaagctgccggtgctggtggccacgcgcatgagcctgagcttcccgctgctgatcagcgcggtgccgctgcatgaaccctcacgccgcgaacgacgctgcgagccgaccgcgccggcggccgaccccgagcacaacgtggccgacagcatggaagggctgaccagcgccgggcaggcttgcggcccggtgatcaccgccttccgcatctgctggttctccgatggtggcatcagcagcaatttcccgatccatctgttcgatgccgcgttgccgcgctggccgaccttcgccatcaatctggtctacccgcagcacgccgaagaggtgaaccacggcagcagtggccgccagtcgctggagcacgcggtgttcctgcccaccgagaaccgacacggctggcagcgcacctaccagtcgatcgccacaccgctggcggccgccgagctgggccgcttcctgttcgcggtggtggcgaccatgcagaactggcgcgatctgctgcaggcgcgcgcgccgggttaccgcgaccgcatcgtgcacgtcagcctgcagggcgacgagggcggcatgaacctggacatgccgcaggaggtgctgacccgcatcgccgacaagggcagcctcgccggtgcgcgcttctgttcgttctcgttcgagaaccactactggatccgctggcgcaacctggcctcggcctaccagcgctacacgctggaagtggcacgcaccgatgatccggcgcagcaggtactggcctaccgcgcggcctattcgatggttgcccgcggggaaccggcaccgccgtcgtacaagctgggctcggaagacaagcggctggcctcgcagcagctgtgggggttgatggtcgagcagggacgtacctgggaagacctcggcccggaccttactgacggcgcaccgcgtccgctgccgcagatgaaggtcacgccgatctactga

SEQ ID NO: 536038 - DNA, 1050 bp, Stenotrophomonas maltophilia; identical to SEQ ID NO: 504022

SEQ ID NO: 536039 - DNA, 1410 bp, Stenotrophomonas maltophilia
atgcactacctcgataatcttctcctcaacaccgacagctacaaggccagccattggctgcagtacccgccgggtaccgatgccacgttcttctacgtcgaatcacgtggcggcctgcacgatcgcacggtgttcttcggcctgcaggcgatcctcaaggacgcgctggcacgaccggtcacccacgccgacatcgacgacgctgctgcggtattcgccgcccatggcgaaccgttcaacgaggccggctggcgcgatatcgtcgaccggcttggcggccacctgccggtgcgcatccgcgccgttcccgagggcagcgtggtgcccacccaccaggcactgatgaccatcgagtcgaccgatccggctgcgttctgggtgccgtcgtatctggaaacgctgctgctgcgcgtgtggtatccggtcaccgtggccaccatcagctggcacgcacggcagaccatcgccgcgttcctgcagcagaccagcgacgacccgcaggggcagctgccgttcaagctgcacgacttcggcgcgcgcggtgtatcgagcctggaatcggccgcgttgggcggtgccgcgcacctggtcaacttcctcggcaccgataccgtgtcggcgctgtgcctggcacgcgcgcactaccacgcgccgatggccggctattcgattccggccgccgagcacagcaccatcaccagttggggccgcgaacgcgaggtggacgcctatcgcaacatgctgcgccagttcggcaagcccggttcgatcgtggcggtggtgtcggacagctatgacatctaccgcgcgatcagcgaacactggggcaccaccctgcgcgatgacgtgatcgcgtcgggcgccaccctggtcatccgtcccgactcgggtgaaccggtggaggtggtggccgaaagcctgcgccggctggatgaagccttcggccacagcctcaacggcaagggctatcgcgtgctcaaccacgtgcgggtgatccagggcgatggcatcaatccggacaccatccgcgcgatcctgcagcgcaccaccgacgacggctacgctgccgacaacgtggccttcggcatgggcggtgcactgctgcagcggctggaccgcgatacgcagaagttcgcgctgaagtgctcggccgcacgggtcgagggtgagtggatcgacgtctacaaggatccggtcaccgacgccggcaaggccagcaagcgtggccgcatgcgcctgctgcgccgcctggacgatggcagcctgcatacggtgccactgccggccaacggcgacgacaccctgccggacggcttcgaggacgcaatggtgaccgtgtgggagaacggccgcctgctgcacgaccagcggctggacgacatccgcacgcgagcggccgtggggcattga

SEQ ID NO: 536040 - DNA, 132 bp, Stenotrophomonas maltophilia
atgtacggcacgccgacctggcgcgacagcaggatgtgctcgcgggtctgcggcatcgggccgtcagcggccgagcacaccaggatcgcgccgtccatctgggcggcaccggtgatcatgttcttgacgtag

SEQ ID NO: 536041 - DNA, 636 bp, Stenotrophomonas maltophilia
atggagacggcacctgcgaaggtgccgttttcgtttgtgcgcacggagagtcgtttccgcgaccgcggaggggtgtcactttctttgcgcgcaaagaaagtaaccaaagaaacgctccgccagccgcgagccgacgctacgcgccggtaccctgcgcttctcggcgaatcaggggacggcgccgaactcgctgcgctcagacaccggcgcctcttcgcccctgattcccctgcgatgctcggctcgctcaaggcggacccaacgtcaaaggcagaagctgcacccagtagatccacgccatgcgtggatgctgttgctcttgctcttgaccttccagtccgccttgagcgagccgagcaccgcaggtccggcgagggcgaagaggtgcgggtgtctgagcgcagcgagttcccgcaccgtccctcgacgggccgaggagcgcagggtaccgatgcgcagcatcagctcgcgccctggcggcgtgtttctttggttactttctttgcacgagcaaagaaagtgacacctctccgcaggcgcggaaacgatacgccgggcatggcccggcgcccccaatgcgtcgacgcgcaaacaaaaacgcccggcgcgaggccaggcgttcctgcactaccttga

SEQ ID NO: 536042 - DNA, 975 bp, Stenotrophomonas maltophilia
atggtcgcgatcaaccctgcaactacaaccgaccccacagggcacatcgctgcactgtcggctatcaaggctcgtaggaaagctcacaaagcaatgtcgcagcgcactgcgagccacgttgctaaagctcccggagcacctcgaaagcgagcaccgaaggtatcccgcgtacctaccgaggtgcagccgggagacatcgccggtcgcctacgtcagaaaggctacaaggctgcaacgggcgtctcctatctgtgtgattacgttgaactgggtggcccaggtacgtcctatggcgtgtcactcccgatgcgcggctcggcgacccagacaatcaacaaactacgccgtgccctcgctaacagcgccatggaaggggaggacgtcagcatttggatggaccctgatgactgccgtttgctcctgtactggccacatcctgaggaagaaatgccgccctacaggtctctttttgggatgaatagcctaaacatgcgcggcgatatgatggtagttccctactctgcgttccctgccaacgtggtgacagacgctcaccgccttcaggcaatccacatggaccacgtactaacccggaaccacagctccatctggattgaagccacctgcgacagtctgcaaagtgtggtcatcgtgactcgtatcacggacacatataggaccgggaacacaatgtcgctccccgcgcagcgctcacgcggtcccgtcgcccctatggaactggaagtgatcgtcaagcctggacaacatggacaagtggtagctagcgccgtcattccccaaagttcgaggcaactggtgggtgccagagagttggtcatgcatgtccccgaggaagcagcaggcctcgccatagcccgcctgcggttgctcggcgaatgtctcgcgaactgctccatctcagcaatggctcctcgcaaacctgttcaggtctacgacttcgctctaccgtactag

SEQ ID NO: 536043 - DNA, 915 bp, Stenotrophomonas maltophilia
atggaccagatgaccgctattcgcctcttcgtactcgcaatcgaacatggcagccttgcagctgccgggcgtaagctcgatgtgtcatccgcgatggcagggcgatatctccagtcgctcgagaaccggctaggagcgagactgatacaacgaagtacgcgccagttaatgctgactgaagtcggaaggctctaccatgcgcggtgcaagcgcatcttggcggagatagatgacgccgagcgagaagtcgccgaccgggatcgggcactgctcggagtcctccgggtggccgcacccgtcacctttggctcgaagtgcctgggcagcaatgtcagcgaatatctcaaactccatccgggaattcgcatagacctaagtttgtccgactgccacgtggatctgcttgcgagcgggatcgacgtggcgatccgcattggcgagatctgggatcagaacctgacggtgcgccgcctagcaaactgtagaatgatggcgtgtgcctcgcctagctacctcagtattcacggcgagccgaagctgccatcggatctggagcgacatgcttgcttggcattcaagggtgccacctcttcaggcgactggaccttcctcgatgccgaaggcgcacagcgggcgccgaacatcgagccccgcctgctggcagacaatatggatctgctgacctcagctgcagtgtcaggcgccggtatcgcctatgggccggagtttgcctttgtagacgcattgagagccggcgcacttgtcccagtgctcacgggtctccgcgccggaatgttgccagttcatgctgtctatccaactgcccgatacattccaaagatggtgcgcgaatttgtcgaccagcttgctcgcgatttcgattgtgtgcctccttggcaggttcagcccatctga

SEQ ID NO: 536044 - DNA, 774 bp, Stenotrophomonas maltophilia
atgaagattgaaaccaacaggatcattagccacgttgaggtgcagggccagggcgataccgcactggtcttcctccactactggggcggctcatcaaggacttggcgtcacgtcaccgagttgctatcacctcgcttcaagaccgtcgcgactgatcacagaggctgggggcggtcatcgtctggagacggatacagtatcgaggcactggcagaggacgccttgagcgtgataaatcgactgggcttggagcgcttcgtcctagtgggccattccatgggggggaaaacagcccagctcatggcctcgaagaggccggcaggattggtggggctggtgcttgttgccccggcatcgcttggtccgtccctctttccgctggaacagcgcgccatgatgagccacgcctacgattcgcgggaatcagtcgaggcgacttgcctaaacgtgctcacggaaaaagtgctcagccgggctgacttgcaacaggtgattgaggacagcttgagcggcacggcggaggcaaagctggcctggcccatggaagcgatgacggaagacctttcatctgaagctgccaagatccaggttccggtcctgatcattggcggggaatgcgacaaggtcgaccccattgcagtactcaaatcacaggtcctgccgctgattccccatgcaaaaatgcacgtactgaagaacaccggccatctttcccctttggaatctcctgatgagctggcaaaccacatctcgcgatttgcagaaggactctga

SEQ ID NO: 536045 - DNA, 417 bp, Stenotrophomonas maltophilia
atgtttcaggacgtggggctactggcaagcagtaggccagaagaggttgcacgcgtcttcgatcaagcgttcaacgaaggcgacctcgaaacactcgtcgatctattcgctcccgacgcaattatgcagttggttgatggcagtcgggtacgtgctcacacaagagaccaccgccgggcgcttgaggacctgctggccacgggcgccaagatccgcaacgacgtacggctctgcatcgtgagccaagacaccgccttgctcctactcgactggagcctccaacttccaggacagcccggcgcggagaacgagatacagatcggcaccgctactcaggtcgtggtggtggatacaagtggtaagtggcggctgaagatcgccaaccccatggggatcgaagtgctttcctgcagctag

SEQ ID NO: 536046 - DNA, 699 bp, Stenotrophomonas maltophilia
atgcctgtcaccccccgctttatcgcctactaccgcgtgtccactcgctctcaggccgcatccggccttggcctcgaggcacagcgcacagcgtgtgaggcactttctgcgcagcgcggtggcgtgatcgttgagacgtacactgaaacagagtccggcaagcacaacacccgccctgagctactgaaggcgctgcgcctgtgttcgctcactggagcgacattgctcattgccaagctggaccgtcttagtcgtaacgccgccttcctactgacgctgcgtgactctggcgcacgattcattgccgctgacatgcccgatgcctgtgagctcacggtcggcatccttgcactcgtcgccgaacaggaacgggtagccatctcgaaccgcaccaaagccgccctacaggctgccaaggcgcgtggccgagtgctgggaaatcccaatggtgccgaagcgctgaggcgcgcggggaagggcaatgcggcggctatgaaggcagtgcagagcaaggcaaacgccttcgcacggagacttgaggacaccgtaagggaacttcagaacaccggcgtcaccaccttgggcggcatcgtgtcctcccttaacagtcgcgggattctgacacctagaggtgctgagtggacccgtgtgggtgtttcgagattgctaaagaggcttgaagggcaagccccaggttga

SEQ ID NO: 536047 - DNA, 669 bp, Stenotrophomonas maltophilia
atggtcgccaggacgcccccgaagccaaccgccgcgctaggacatgtaacgtctgggctgaagctcgttgacgacatgatgaacctgacgaaggcaggcaaaggcaaaccgtcgcagggagagcgcgccatcttcgctgcatcgattgtcttcatatacggtgtttgggagaactacgccgagcagcttgcaatcgaagtcgtttctactctgtctgcgagtatcgacccgaccaaggttcccaaagatgtaaaggtacaactcgagaaaaggacagcttgggaacttagcgtttccccaggctggaggcagtgctggattgacgccgtcaagaagctggcggtcggaagtgaatcgtcggagagccgaggcatcaatacagccaggcatgggaccgtccgcaacttactccaaatggccggggttccagatgcattcaatgggctagatggacttttgttcccactacacctttccccagcatcgcacaccaataaggaagccttagaagccttggttcagctgcggggcgagattgtccacaccggcaaggttccgcagactttgatcaaggcgcatgtcgtaaattggagaacctatgtcgaagccctgaccaagggaatggacgaggtgtgccaactgcattgtgaggcggcgctcaaacactga

SEQ ID NO: 536048 - DNA, 1224 bp, Stenotrophomonas maltophilia
atgcgccacgaacctgaggtgtacgtaaggcgtgccgaggttgcccaccggttgatccgggatggcatcgatcaatggtcgccggagctgatcgtggagcgcgcccgcgaggtgttcgccatgcagcaggctggagagatagcagccaacgacgtcgaagcccaggtcgaaatcgacgtggagaggtacgtcgcgcagcagcaaaatgccggtgcacagatcgatatcgagggcgtgagacgtgccagaagggccgcgctcggccaacttggggtcaccgtggccgatagcctagagtcctacctgcatgagcgtacaggagacctcacagcacaatctctgactgagaccaagaaacgctgcactgcgttcgctcggtgggtcgggagcaatgttgagatggcgaccattacccgtgtcacggctggacagttcttggcgaaggtgatccaaccgcgaccagtgtctaggacgacgaagacgaaggagatatccgcctgtcggggctggttccaatgggcaatgctgcgcggcgaaattgacgccaaccccttcgacgggatgcaagcgacgttgaagaagtcaaagcgtggcactgagggtccgcggagggcgtggaccgaggctgaactgcttgttgtactgaggggcctgaaggatgaccgacgtgaaccgctattgcttcctcttacgctgctggcgctctacacagggatgcgattgaacgaggtctgcaacctcatggcgaccgactacgattcagcagcccaggtgctacacgtccgcgaaggcaagtcacaagcagcgataagggcggtcccgatccacccgatcatccgttcaaccgttgcacgactggcgagggagacaactgatggctacttgctgccaggcctcgtgccgggaggcgccgacggcaagcgaggccacggcatcggcaagacgtggggcaggcgcattcgcaccctcggcatcactgaccgtcggctgatgttccatgcgctgcgagcaaccttcatcacagccgctctcaatggcggcgcatcgaaggaggttgttcagcagattgccggtcacgaacgcgagggcgtcaccatgacgagctatgcgcgcgtgctatccatcgacctttgccgaatggccgttgcagctgtgaagttcgaggcaactgacgaatacgcgctcaatttgaccaatcttgcgacgcaaacgcctgcgttttga

SEQ ID NO: 536049 - DNA, 279 bp, Stenotrophomonas maltophilia
gtgagtgccaatggtggtgactggacggtggtgcagaacggtggcgggaacagctttggtcccagccgtggcaatggcagctatgcctaccgggtgagggcatgcaatttcggggggtgcagtccttactcgggtatcgccagtgtctccgtggtgcttcctcccgcggccactcagatctacgtggccaagtggctcagcatgcgcaaggcacccgatcaggtgcagtgcagcgtgggctggctggcggttccggggggcaacggaatatcagcttga

SEQ ID NO: 536050 - DNA, 201 bp, Stenotrophomonas maltophilia
atgtccaagccgatcctgaaaggcatcaccatctattacgcgaaaactgccgttttcacgatcgccagctatgggttgctgcgtctagtgtacgggcatacagggatttcattcattgaatggacgctcacacttctggcggcgtttacagtgggttacatacctgttttcgttggcttgctacgcgggaagagttcataa

SEQ ID NO: 536051 - DNA, 1257 bp, Stenotrophomonas maltophilia
atgaacctgtccacgccgcgaccgatcgaagaacgcaccggcgcccccgactgggaccgcgtccgcctcgacttcccgctgctgatgcgtgaagtacatggcaagccgctggtctatttcgacaatgccaacaccggccagaagccggtgcaggtgatcggcgcggtggacgagttctaccgccgctacaacgccaacgtcagccgcgcggtgcatgcactgggcagcgaagccaccgacgcctacgaaggcgcacgcaacacgctggcgcgcttcctcaacgtgcggcccagcgacctggtgctgtgcagtggcaccaccttcgccatcaacctggtggcctattcgtgggcgctgcctcgactgaaggccggcgacgtgatcctgatcacgcgcatggagcaccacgccaacatcgtgccgtggcagctggtcgcgcagcgtaccggcgccaccatccgcgtagccgagatcacgcctgacggcgcactcgatctggatgcgctgcgcgcggcgatgaccccggaggtcaagctgctggccgtcacccacgtctccaacgtgctgggcacggtcaacccggtgcgcgagatctgccgcgaagcgcgcaagcgcggcatcatcaccgtggtcgatggctcgcaggccgtgccgcaccgcaaggtcgatgtcgccgcgatcggctgcgacttctacgccattaccggccacaagatgtgcggcccgaccggcaccggcgccttgtgggcgcgccgcgagcatctggatgcgatgccgccgttcctcggtggcggcgagatgatcaaggaagtcagcttcgacggcaccgtgttcaacgatgccccgcacaaattcgaagccggcaccccgaacatcgccggtttcatcggcctgggtgtggctgccgactacctgcagcagcttggccaggagaacgtggaagcacgcgaagccgaactgctggcgcacttcaccgaagaactgcgccgcgtcgacggcctgcgcatcatcggcgaagcgccggagaaggctgcggtggtctcgttcctgatcgatggcgcgcatgcgcacgatctggccacccttctggatctggaaggcgtggccgtgcgctcgggtcagcactgcgcacacccgctgctgcagtacttcggcgtcgcggctacctgccgcgcctcgctcgcgttctacaacacgcatgccgagatcgagcggttcatgacggcgttgacgaaggtgcgaaagctgctgggctga

SEQ ID NO: 536052 - DNA, 1263 bp, Stenotrophomonas maltophilia
atgagcgccctgcttgattcgatggcccaggccttctgcggcagcgatgcgcgccgcgaagtgctggatgcggccctgcgcgatggcctgccggccgcccgcaacgaggcctggaagtacacctcgctgcgccagctggagcgccgtgcgttcgcggctgcaccgctgtccccgccggccctggatgccgcgctgctggaggacatcccggcaccgcgcctggtgttcgtcaacggccgcctggacgccgcgctgagcgacgtgcaggccttgccggccggcgtgcagctgcagccactgtcggccgcactggcctccggcgaagatgccgtgcgtttccttggccgccgctacgagcgcagcgaggagatcttcgcccgtctgaatgccgcgctggccgatgaaggcgtagtgctgcgcgtggatgaaggcgtacaggtcgacatgccgctgcagctggtgttcgccagcatcgccggcgacaccgacctggcctggcatcaccgccacctgatcgaactacgtgccggcgccagcctgggtgtagtcgagcatcgcttcagcgtgggcgattcggcgcacctggacaacaccgtgctgcacgcccatgtcgcccgcgatgccgtgctcaagcacgcccgcgtgcaggccggcagcgcgcgccagaccagcttcctgcgcaccgacgccgtgctggcccgcgacgcgcagtaccaccgcgtggacctggaactgggcgccgcgctcagccgccatgaactgaacgtgcgcctcgaaggcgacaatgcccagctgaccgccaacggcgtgctgcttggcaatggccgccgccacgtcgaaacccgcctgggcatcgaccacatcgcgcgcgataccagctgcgaactgctgtggcgcggcgtcgccgccaaccgcagccgcgtggtgttccatggtggcatccagatccgcgaaggcgccgatggcaccgacgcgaacctgtccaacaagaacctgctgctgtcggccgatgccgagatcgacacccagccaacgctggtgatcgacgccgatgaagtgaaggccgcgcacggtgcgactgtcggccagctcgatgccaacgcgctgttctacctgcgctcgcgcggcctgccgcaggcacaggcgcaggcactgctgagcgccgcgttctgccacgagccgttgaagatcctgccggacgcactgcgtgcgcagctggcacgccgcctggacaaggcgctggccgaggcaggtgtggcatga

SEQ ID NO: 536053 - DNA, 765 bp, Stenotrophomonas maltophilia
atgctgaagatcgaaaacctccacgcccgcatcggcgacaaggaaatcctcaagggcctgtcgctggacgtccagccgggccaggtgcacgccatcatgggcccgaacggcgccggcaagtccaccctgggcaatgtcctggccggccgcgacggctacgaagtgaccgaaggcagcgtgcagttcgacggcgtcgacctgctggagcagggcccggaagcgcgcgccgctgccggcctgttcctggcgttccagtacccggtggagatcccgggcgtgaacaacacctacttcctgcgcgcggcactgaacgcccagcgcaaggcacgcggcgaggaagaactcgattccatgcagttcctcaagctggtgcgccagaagctggccgtgctgcacctgaaggacgaactgctgcaccgtggcgtcaacgaaggcttctccggtggcgagaagaagcgcaacgagatcttccagctggccgtgctggaaccgaagctggcgatcctggacgaaaccgactcgggcctggacatcgatgcactgaagagcgtggccgatggtgtcaacgcactgcgcgctgctgatcgctcgttcctggtcatcacccactaccagcgcctgctggactacatcaagccggacgtggtgcacgtgctggccgatggccgcatcgtcaaaagtggcggcccggagctggcactggaactggaagcgcacggctatgatttcctgaaggaccgggtcgtgcccgaggcggcggtctga

SEQ ID NO: 536054 - DNA, 1476 bp, Stenotrophomonas maltophilia
atggccaccgaaaccatcgaaaacgtcgcccacgacgacacccccaaccgcgagatccacgagcagctcggccgcaagtattcggccggcttcatcaccgagatcgagtcggactccctgccgccgggcctggacgaggacaccatccgtgccctgtcggccaagaaggacgagccggagtggatgacgcagtggcgcctggacgcctaccgccacttcctgaccatgccgatgccggactgggccaagctggagatcgccccgatcgatctgcaggcgctcagctactactccgcgccgaagggcccgaagtacgcctcgctggatgacgtgcccaaggagcttctggacacctacgacaagctgggcgtgccgctgcacgagcgcgccaagctggccggcgtggcggtggatgcggtgttcgactcggtgtcggtcggtaccaccttccgcaaggaactggccgagaagggcatcatcttctgctcgatgtccgaggccatcaaggaacacccggagctggtgcgccagtacctgggcaccgtggtgccggtcggcgacaactacttcgccgcgctcaactcggcggtgttctccgatggcagcttcgtgttcatccccaagggcgtgcgctgcccgatggaactgagcacctacttccgcatcaacgccggccacaccggccagttcgagcgcaccctgatcgtgtgcgaggacaaggcctacgtgtcctacctggaaggctgcaccgcgccgatgcgcgacgagaaccagctgcacgccgccgtggtcgagctggtcgcgctggaagatgcggagatcaagtattccaccgtgcagaactggtacccgggcgacgagaacggcgtcggcggcatctacaacttcgtcaccaagcgtgccgaatgccgtggcgcgcgcagcaaggtcacctggacccaggtcgaaaccggctcggcgatcacctggaagtacccgtcctgcgtgctgctgggcgacgactcggtgggcgagttccactcggtggcgctgacccatcaccgccagcaggccgacaccggcaccaagatgatccacgttggcaagcgcaccaagagcaagatcgtcagcaagggcatcagcgccggccgcggccagaacacctaccgcggcctggtgcgtgtggaccgcaatgccgatggcgcgcgcaactacacccagtgcgattcgctgctgatcggcaagcagtgcggcgcgcacaccttcccctacatcgaggtgaagaacccgggcgccaccgtcgagcacgaggccaccacctcgaagatttccgacgaccagctgttctactgccgcgcccgtggcatcagccaggaagacgcggtgtcgatgatcgtcgacggcttctgcaagcaggtgttccgcgaactgccgatggagttcgcggtggaagccaagaagctgctggaagtctcgctggaaggttcggtgggctga

SEQ ID NO: 536055 - DNA, 456 bp, Stenotrophomonas maltophilia
atgttgcgcgtcaccaaactcaccgattacgccaccgtcgtactgaccgtgctcgccgcccgtccgggcgaggtgctcagtgccaccgagctggccgaattcaccggtctggagccgcccaccgtcagcaaggtactcaagccgctggcccaggccggcctggttgaaggcctgcgcggcgtccgtggcggctaccgcctgacccgcccggccatcgagatctcgctgttcgaagtggtcgaagcgatggaagggccgctggccctgaccgaatgcagccacgaccaccaccagtgcggcatggcgcccaagtgcggcgcgcgcagcagctggcggctgatcaacgacgtggtttccgaggccctgcgcgatgtcaccctcgcccagatcctgccccctctcccccttgccgatgacgaacagcgccgcaccatcgctgtcgacgtcgtctcctga

SEQ ID NO: 536056 - DNA, 468 bp, Stenotrophomonas maltophilia
atgcccaagaagatccaagcccgcaagtccgccatccacggcaacggtgtgttttccgtggccccgatcaagcagggcgagcgcgtgatccagtacaagggcctgctgcgcagccacggcgacgttgatgccgatgacagcggcgacgttgaaagtggccataccttcctgttcaccctcaatgacgactgggtgatcgatgccaactacaagggcaacgacgcgcgctggatcaaccacagctgcgacccgaactgcgaggcagtgatcgaggaagacgaggacggcgacagccgtggcgacaaggtgttcatcgaggcgctgcgcgatatcaaggccggtgaggaactgacctacaactacggcatcaccctggccgagcgtcataccgccaagctgaagaagatctgggagtgccgctgcggctcgcccaagtgcaccggcaccatgctgcagcccaagcgctga

SEQ ID NO: 536057 - DNA, 543 bp, Stenotrophomonas maltophilia
atggcagagcgattgaagggcaagcagattgccatcctggccacccacggcttcgaacagtccgaattgaccgaacccaagcggctgctggaagccgagggcgcgcgcgtcagcgtggtgtcgcccgcaaaggaggcgacgatcaagggctggaaggagaagaactggggcgacgccgtcgcggtggacattccgctggatgaagcggatccggcacgcttcgatgccttggtcctgcccggaggcgtcatcaatccggacacgctgcgtaccgacgaggttgtactcggcttcatccgggcagtggatgaagccggcaagcctgtggcggccatctgccacggcccgtggttgctgatcaacagcggccttgctgaggggcgcgacgtgacgtcctggccgtccctgcagcaggatctggtcaacgcaggtgcgaaatggcgcgataccgcggttgtgatcgatggaaacctgatcaccagccgcaagccggacgacattcccgccttcagtgaggcggtggtcaaggcacttgccgcctga

SEQ ID NO: 536058 - DNA, 597 bp, Stenotrophomonas maltophilia
atgcgcctgcgttccctgatgacccgcctcgcggcctccaccgtgctgatcgctgctgcgatcggcgcccaggccgccccttccatttccggccgcgaactgtcggtcggtgccagcgacgtgcagcagtacctcgatggcagcttcccgcgcacccaggacgccctggggggcctgatcgccctgaccatgagccatccgcagctgagccttccggccggcgaacggttgaacctgggcatggacgtcgcactggccaccgccggtagcaacccgtccaagctgggaacggtgaagctcagcagcggcctgcgctacgacgcgcagacccagggcttccacctgcagcagccgagcgtggatgacttcaccccggccaaccagggcggtcgcctcgattcgcgcacccgcggcctgctcaatgcctggctgagcgactacgcccagcgcgaaccgatctacaagctggacccggccgtggccggcctgctcggcgcactgcaggtgcagtcggcacaggtgaagaacggcaaactggtggtcaccttcaaccagaacctgggcaacttggtgccggcaggcgtgctgggtaaatga

SEQ ID NO: 536059 - DNA, 549 bp, Stenotrophomonas maltophilia
atgcgcaggttcctgatactgatcgcaccgctggtgctgctggcctgttcccggccgccatcgcaacctcatcctgcggatgccgctccgccggccacgaccgaggcggctgcccgcgcgaagccacaggccgccgcagaaggcgatgcagcggccgtgcaggccatcgatgtcgatcccctgtttgccgccgtcgcggccgaggccgagctgccagcgggaatgctcaatgcctatgtcatggccctgctcaatcgcgatcgcaaggccatcgacgccgcatggaccttcccgcccagcgatgcacgacgcgccgacgatgccgcattgcgccagctcacggacgtgcgcagcctgcgcctggccagcgaactgccggtcgcgcgcgacggtcaccagccaccgcagctgctggaggttccggtgcagatccgcgcggtgaccgctgagggcaccttccgcttcggcggctggtaccgcgtgcagcccagcagcgatggccgcgcctggcagatccagtcggcgcaactgcggccatcgctggactga

SEQ ID NO: 536060 - DNA, 309 bp, Stenotrophomonas maltophilia
atggccagcccctccacccgctaccggatctcggtgacccccatcgaaaaggacgggttgcagtgcaccgggcgctgcaccatcgaactggaacatcgcgccagccgcgacctgatgcgcctgctggaagcggcgccgcgcaccgcaggcatcagcggcgacgagcgcgcgaccctggtgatcgccacccagctgctgcgcgacatcgtgcagcgccacgccgaaaccgaaggccatgccctggccgccatcgccgcgcaggtgctgccggcgctggatgcactggaacagctgccctcctcccgctga

SEQ ID NO: 536061 - DNA, 399 bp, Stenotrophomonas maltophilia; identical to SEQ ID NO: 492678

SEQ ID NO: 536062 - DNA, 432 bp, Stenotrophomonas maltophilia
atgggaatctcgcgacacgccaccgcgcactgggaaggcgatctgaagtcgggcaaggggcagttgagcacgccgcagagtggcctgctggacaagacccgctacggcttcaacagccgtttcggcgacgaaaagggcaccaatccggaagagctgatcgctgccgcgcacgccggttgtttcaccatggcgctgtcggccaagctcggcgaagccggctttaccccgacctcgctggataccgaggccaaggtcgatctgtcgctggaaggcggcccgcagctgtcgcagatccggctgaaggtgaaggcggtggtgccgggcatcgacgcgacgcagttccgtgcgattgccgatgacgccaagcagaactgcccggtgtccaaggcactgagcgccgtgccgatcagcctggaagccgagctgggctga

SEQ ID NO: 536063 - DNA, 879 bp, Stenotrophomonas maltophilia
atgaccacccgccgtttcctgcagctggatgtgttctccccgcgcgccggcgccggtaacccgctggccgtggtactcgatgccgagggcctggacgatgccagcatgcaggccatcgcccgctggacgcgactgcccgaaaccaccttcgtgtttccaccgcaggcacccggtgccagctaccggctgcgcatgttcagcccgcagaaggaagtgccgttcgccggccaccccagcgtcggcacggcgcatgcggtgctgcaggcaggcctggccacaccgatcgatggcgtgctggtgcaggacggcattgccggcgccctgccgctgcgcgtcaacggtgaaggcgcgcagcagcgcatcgccatccgcaccccgcgcgcgcagctggccgagacgaccgaggccaccgatcctcgcctgcaggccgcactgaagggctggccgctgggcacgctgccgccggcacgcatgcagggcgggcggagctggtgggtggtgcaggtggccgatgaggccgcattgcgcgcgctgcagccggactgggatgcggtggccgcactggccgagaccaccgacagcatgggcgtgttcgcctatgccttcagcaatggcagcgagggcttcgacctggcggtacgtgccttcgtcggtaatggacgccgcttcgaggacgccgcctccggtgccgccaacgccgtgctggccgcatggctggacctgcgcgatgcgctgccccgtggccgtgccccgttcgaagtcagccagggccgcgaagtcggccacgatgcgcgcctgacgctgctggtcgacgaggacggcgaggtctggtcgggcggccaggtgcagaccgtcatcaccggcaccatcgattggtaa

SEQ ID NO: 536064 - DNA, 873 bp, Stenotrophomonas maltophilia
atggccgtcctccgttacctgcagctcgatgtcttcgccccccgccccggcaccggcaacccactgggcgtcatcctggacgccgacgggctctccagccgccagatgcaggccctggccgcctggctgaacctgtccgagacggtgttcttcctgcggcccaccgcgcccggcgccgactaccacatccgcatcttcaccccgacccgtgagctggccttcgccggccaccccagcgtcggcgccgcctgggccgcggtgagctgtggcttggcgcaaccgcgcgacggcgccctgctgcagcaatgcgcggcggggttgctgccggtacgggtgagcggtccggccgaggcactgcagatccagctggccagcccaccggcacggcaactggacacgagggtggacgccgcgccggagacgctgctggcgctggcggccaacgggcacgtgcccgaactgtgggacaacggtgcacgctggtggctgctgccgctgcgcgacgccgccgccgtgcgcgggctggcgccagacatggcggccctgcgcgactggagcctggccaccgacgctactggcctggccgtgttcgccgacgagcccggcgacgaccacgcccgcgtggtgcgcgccttctgccccgctgacgcggccgccgtacccgaagacccggtgaccggcagcgccaatgcgctgatcggcgcctggctgcggcagcgcgatgccctgcccggccgcgaaggccgctacgtggccagccagggccgcgaagtgggccgcgatggccgcgtgcaggtgcaggtcgacgcgcagggcacggtgtggatcggcggccaggtgcagtgcgtgatcgacggcagcatccattggtag

SEQ ID NO: 536065 - DNA, 2595 bp, Stenotrophomonas maltophilia
atgtcagcttccccccttgtcgatcgttggatcgtactgaagttcggcggcacctcggtgtcgcgtcgtcatcgctgggacacgatcgggaagctggcgaaaaaacgtgcggaagagaccggctcgcgcgtgctggtagtggtgtcggcgctgtccggggtcaccaacgaactgaccgcgatcgccgatggcgcgccggacagccgtgatcgcgtggccgcgctggtcgagcgccacgagggcttcctggttgaactgggcctgggccgcgaagtactggccgagcgcctggcggcgctgcagggcctgctcgacgacgcgcgtgcggccacccgtccactggactggcaggccgacgtgctgggccagggcgagctgttgtcctccaccttgggcgcggcctacctgcacgcctcgggcctggacatgggctggatggatgcccgccagtggctggatgcgatgccgccgcagccgaaccagagcgactggtcgcagcgcctgtcggtgaactgccagtggcgtgccgatgcggactggatgcagcgcttccgcgcgcagccgacccgcctgctgatcacccagggcttcatttcgcggcatgccgatggcggtaccgccatcctcggccgtggtggctcggatacctcggcggcgtacttcggtgcgctgctcggcgccagccgggtggagatctggaccgatgtgccgggcatgttcagcgccaatccgaaggacgtgccggacgcacgcctgctgacccgcctggactattacgaagcgcaggaaatcgccaccaccggcgccaaggtgctgcacccgcgctcgatcaagccgtgccgcgatgccggcgtgccgatggccatcctcgataccgagcgcccggaactgccgggcaccagcatcgatggcagcgccgcaccggtgccgggggtgaaggcgatcagccgccgcaatggcatcgtgctggtgtcgatggaaggcatcggcatgtggcagcaggtcggcttcctggccgatgtgttcaacctgttcaagaagcacggcctgtcggtggacctgatcggttcggccgagaccaacgtcaccgtgtccctggacccgtccgagaacctggtcaacaccgatgtgctggccgcgctgtcggccgacctgtcgcagatctgcaaggtgaaggtgatcgtgccgtgcgcggcgatcaccctggtgggccgcggcatgcggtcgctgctgcacaagctgtcggacgtgtgggccaccttcggccgcgagcgcgtgcacatgatctcgcagtcgtccaacgacctgaacttgaccttcgtcatcgacgaggccgatgccgatggcctgctgccgatcctgcacgcagagctgatcgacagcggcgcgatgccggtggaagagaccgaagtgttcggcccgcgctggcgcgagattgccggcaccgtgcgcccgcgcggcacgccgtggtggcgcggccagcgtgcgcacctgctgcagctggccgatgccggtacgccgcgctacgtctaccacctgccgacggtgcgcgcccgcgcccgtgcactggccgcaatcaagccgatcgaccagcgctactacgcgatcaaggccaacagccacccggccatcctgcagctgctggaagccgaaggcttcggcctggagtgcgtgtcgcacggcgagctgaagcatgtgttccagcacctgccggaactgtcgcccaagcgcgtgctgttcacccccagcttttgcccgcgcagcgagtacgaggcggcgtttgcgctgggcgtgaccgtgaccgtcgacaacgtggaagcgctgcagcgctggccggacctgttccgtaaccgcgagctgtggctgcgcgtcgatctgggccggggcgagggccaccacgccaaggtccgcaccggtggcaaggagtccaagttcggcctgccgatcgcccgcgtcgacgagttcgtgcgcgcggccaccgaactgggcagccgcgtggtgggcctgcatgcgcacctgggcagcggcgtggaaaccgcgcagcactggcgcctgatgtgcgatgagctggccggtttcgcccgccgcatcggcagcgtacagaccatcgatatcggtggcggcctgccaattccgtacagcgacgaagacgaacccttcgacctggacgcctgggccgagggcctggccgaggtcaaggcgctgcacccggcattccgcctggcgatcgagccgggccgctacctggtggccgagtccggcgtgttgctgacccatgtcacccaggtggtggaaaaggagggcgtgcgccgcgtcggcctggatgccggcatgaatgcactgatgcgcccggcgctgtacgacgcctggcacgacatcgagaacctcagccgccagggcggttatgccgaagcggcgttcgatgtggtcggcccgatctgcgaatccagcgatgtgttcggcaagcgccgcaagctgccggtgtcgaccgcgccggatgacgtgatgctgatcgccgatgccggcgcctacggctattcgatggccaacacctacaaccagcggatgctgccgcgcgaagacgtgatcgaatga

SEQ ID NO: 536066 - DNA, 1353 bp, Stenotrophomonas maltophilia
atgactgctttcgacaaacaccaggtttcccgcttccgcttcgtccgctgcgaattcgctgcggaaaccggcgtggcccggctggtctacgccttcgatgacggcccggagatggtggaaaccatcaccgtgccgggcgccccgttcgtgcttgacgaggcgcgtaccgccgccgtgcagcgcgcgctgcagctgctgcacctgatcgccggtgtcagctactacaaggcgggcgtgccggagacggtcagcatcgacagctacgccatcgatgccgataccgcagcgctggtggagacggtctacctcaacggcctgggcgagttcgcctaccgcaacggtctgaacctgcgcgggcgcttccgcctgccggtgcagggcgaagcggtgcaggcgccggtgctggggctgcaggcgcacgcgctggtggccatcggcggcggcaaggattcgctggtcagcatcgaagcgctgcgccgcgccggcgtggacgagacggtgacctggatcggcggatcgcagctgatccgcgcctgtgccgaacgcaccggcctgccgacgctcaacctgggccgcgcgctggcaccggaactgttcgagctcaaccgccagggcgcgtggaacgggcatatcccggttaccgcggtgaactcggcgatcatggtgctggccgcgctgttgcagggtgtggatcaggtggtgttctccaacgagcgttcggccagctacggcagccagattccgggcaccggcgaagtgaaccaccagtggtccaagggctgggcgttcgagcaggcgttcggcagccacgtgcagaagcacgtcgcggcagacctgcagtactactcgctgctgcgcccgatgtcggagctggcggtggcccgccagttcgccaagaccgatttctacgacgcgcatttctccagctgcaaccgcaacttccacatcctcggcgagcgcccggtgaaccgctggtgtggcgtctgcccgaagtgccatttcgtgttcctggcgctggccccgttcatgcccaagacgcgcctggtgcgcatcttcggccgcaacctgctggacgatgccgagcaggccggtggcttcgatgcgctgctggaattccaggaccacaagccgttcgagtgcgtgggtgaaggccgcgaatcgcgtgcggcgatggcgacgctggcgcagcgcccggagtggaaggaagacgtgctggtgaagcgcttctgcaacgagatccagccgcagctggatgccgccgaactggaactgacgccgctgctgcagctgcagggcgagcaccgcgttccggctgcgctgtgggaacgggtgcgtgaagatttcgaagcttga

SEQ ID NO: 536067 - DNA, 1410 bp, Stenotrophomonas maltophilia
gtgaagatttcgaagcttgagggaaagcgcgttgcgctgtggggctggggccgtgagggccgcgccgcgtttgcggtgctgcgtgagcgcctgccaacgcttggcctgagcctgttctgcccggccgctgaagccgaagccgcgcgtgcggaaacgcagggcgcgctgcaggtgcttggcgaaccctcggccgaagcgctggccgcgttcgatgtggtgatcaagtcgcccggcatcagcccttaccagccgatcgcgctggcggcggtagagcagggcaccaccttcatcggcggcaccgcgctgtggtttgccgaacacgcggccgacgacggcatcgtgcacgacaccgtgtgcgtgaccggtaccaagggcaagagcaccaccaccgccttggtcgcgcacctgctgcgtgccgccggccatcgcaccggcctggtcggcaacatcggcctgccgctgctggaagtgctggatccgcagccggcacccgagtattgggcggtggaactgtccagttaccagaccggtgaagtggcgcgcagtggcgctcatccgcaggtggcggtggtactgaacctgttccccgaacacctggactggcacggcagcgaacaacgttacatcgaagacaagctgcggctggtgactgaagctgcgccgcgcatcgccgtgctcaatgccgccgatccgcatctggccgcgctgtcgttgcccgacagtgaggtggtctggttcaaccagccgcaggggtggcacatgcgcgctgacatcgtgcatcgcggcgaacaggcggtgttcgatacccgcaacacgccgctgccgggccgccacaaccgcggcaacctgtgcgcggtgctggctgcactggaagcgctgggcctggacgcggtggcgctggcaccggcggtgcaggatttccgcccgctgccgaaccgcctgcagcggattggcgtggccgatggcctgacctacgtcaacgattcgatcagcaccacgccgcatgccagcctggccgcgctggaatgcttcgccgggcagcgcatcgcgctgctggtgggcgggcatgaccgcggcctggactggaccgatttcatgcagcacatggcgcacgacgtgccgccggtggagattgtgaccatgggcagcaacggcccgcgcatccacgcgatgctgcagccgctggccgatgccggtcgcttcggcctgcacgccgccggcgacctgcccgaggcgatggcgcttgcacgcgcggcgctgggtgcgcagggtggggtggtgctgctgtcgccgggtgccccgagtttcggtgcctatcgcgattacgtggcgcgtggccgccattttgccgagctggctggtttcgacccggagagcatcagcgcgattcccgggctgggtatcgcttga

SEQ ID NO: 536068 - DNA, 597 bp, Stenotrophomonas maltophilia
atgaatcttgttgatcgctttctgtctggcctgatcccgcgcctgcctgctgacgatgccccgcaatgggcccacgtgcagggcgcaagcgccgaagacctgcaacgcctgcgggcgcagtggccgcaggtgccggacagcctggtggagctgctgtcgcgcgtggatggcacgcacttccgcgagtatcccgatggcgaggtctgcgtgctcatgctgggctcggacgtcgaggacggcggctacccgtactacctgcgctcagtggcgcagatcttcgaggaccagcagcagtgggacgacagcatccgttccatctacgaggaatggctggatgacgaaccggagatcctgggtgaaggcatcgacgccgatctgccgatgaaccgccgcctgtgcttctcgcaatgcatgaacaacggcggcacctcgatgctgtatctggatttcgatcccgcgccgggcggcacggtcggccaggtggtgcgctacctgcacgatccggacagctacgcggtgatcgcaccgagcttcgatgtgtacctgcaggagctgattgatcgcgattacgcgttcatcgatcaggacgacgattga

SEQ ID NO: 536069 - DNA, 786 bp, Stenotrophomonas maltophilia
atgaatcgttggcgatgcggtgtggcggtgatcctggggctggcggcgatgccggcgtgggcggcgatgaagacgcagccggtggaatggaaacaccagggcacgaccttcagtggcgtgctggtctatgacgacggcgagcatgacaagcgccctggcctggtgatggtgccgaactggaagggcgtgaacgaatcggccatcgagaaggccaagcagctggccggtgacgactacgtggtgctggtggccgatgtctacggcaagggtgtgcggccgaagaccgatgccgaggccgggccggtggcgaccaagctgcgcaacgaccggccgttgctgcgtgcccgcgcgctggaggcggtgaacgtgctcaaggcgcaggccggcaaggtgccgctggatgccagccggatcggcgcggtgggcttctgttttggcggcaccacggtgctggagctggcccgggccggtgcgccgctggccggtgtggtgagcctgcacggtggattgggctcgccgttgccggcgcaggccggtggcagccatccgtcggtgctggtgctcaatggcgccgacgacaagagcgtgaccgccgaggacatcgccggtttccagaaggaaatgaacgcggccaaggtcgattgggagttcaccaactacagtggtgcggtgcactgctttgccgagcgcgatgccaacagtccgccgggctgccagtacaacgaacgggcggccaagcgcgcgtggaaggcgctggatgaattcttcgaggagcggttccggtaa

SEQ ID NO: 536070 - DNA, 999 bp, Stenotrophomonas maltophilia
atgaccatcaccgaagacacccgtcccgccctgggcctgccccagatccagtcgcttgctgcggccgacatggccgccgtcgacgccctgatccggcgccggctgtcctcggacgtcgtgctgatcaaccagatcgccgatcacatcatttccgccggcggcaagcgcctgcgcccgatgctggtcatgctggccggccatgcggtcggccaggccggcccggatcaccaccagctggcggcaatcatcgagttcatccacacctccaccctgctgcacgacgacgtggtggacgaatccagcctgcgccgtggccgcagcaccgccaacgcgctctggggcaatgcaccgagcgtgctggtcggcgacttcctgtactcgcgcagcttccagctgatggtcgaactggagcgcatgtcggtgatgcagatcctggccgatgccaccaaccgcatcgctgagggtgaggtgttgcagctgctgcacgtgcacaaccccgataccgacgaagccgcgtacctccgcgtgatcgagcgcaagaccgcggtgctgttcgccgccggcacccgcctgggcgcgctggccagtggcgtggacgaagccaagcaacaggccctgttcgactacggcatgcacctgggctacgcgttccagatcgccgacgacgtgctggactactcggccaacgccgacgagctgggcaagaacctgggcgatgatctggccgaaggcaaggcgacgctgccgctgatccacgcgatggcccattccgacgacgccacccgtgagcgcctgcgcaccatcgtgcaggacggcgatgcctcggcgatgccggaagtgctggccgcgatccgcgccaccggcggcctggaatacagccgcgcgcgtgcggaggaatacgccgaagccgccgagcgcgcgctcgatggcctgggcgacaacgacgcggtcgccgccctgcgcggcctggcccgctacgcggtgcagcgctcgcattga

SEQ ID NO: 536071 - DNA, 1614 bp, Stenotrophomonas maltophilia
atgtcgcactatccatggtggcgcggagccgtcatctaccagatctacccgcgcagctacctcgatgccaacggcgacggggtgggtgacctgccgggcatcatcgagcggctggaccacatcgccgcgctgggcgtggacgcgatctggatttcgccgttcttcaagtcccccatggccgacttcggctacgacatcgccgactaccgcgacgtcgacccgctgttcggcagcctggacgacttcgaccggctgctggccaaggcccacggcctgggcctgaaggtgatgatcgaccaggtgctgagccatacctcgatcgagcacgcctggttccgcgagagccgccaggaccgcagcaatccgaaggccgactggtacgtgtgggccgatccgcgcgaggacggcaccccgcccaacaactggctgtcgctgttcggcggcggcgcctggcagtgggagccgcgccgtgagcagtactacctgcacaacttcctggtcgaccagccggacctgaacttccaccacccggacgtgcagcaggccaccctggacaacgtgcgcttctggctggaccgcggcgtggacggcttccgcctggacgccatcaatttctgcttccacgacgcgcagctgcgcgacaacccgccaaagcccgccgacaagcgcgtgggccgcggcttcagcccggacaacccgtacgcgtaccagtaccactactacaacaacacccagccggagaacctgcccttcctggagcgcctgcgcgcgctgctggacgagtacccgggcgcggtgagcctgggcgagatctcctcggaggactcgctggccaccaccgccgagtacacccgggacggccgcctgcacatgggctacagcttcgagctgctggtggatgactacagcgcggcctacatccgcgacacggtctcccgcctggaagcggcgatgaccgaaggctggccgtgctgggcggtttcgaatcacgacgtggagcgggcggtcagccgttggggcgggcacccggccgacccgcggctggcacggatgctggtggcgctgctgtgctcgctgcgcggctcggtgtgcctgtaccagggcgaggagctgggcctggccgaggccgaggtgccgttcgaggccctgcaggacccctacggcatcaccttctggccgaacttcaagggccgtgatggctgccgcacgccgatgccgtggaccgatgcgccgctggccggtttcacgtccggccagccgtggctgccgatcccggccgagcaccgcgccgcggccgtggcggtgcaggagcgcgacccgcactcggtcctggccgcgttccgggggttcctggcctggcggcatagccagccggcgctcctgcatggcagcatccgattcatcgaaagtgccgagccagtgctgctgttcgagcgtatgcttgcagatgaaaccctcctgctggccttcaacctgtcggccgaggcggtgagccatccgctgccgccgggcaactggcagcaggtgacggtaccgggcccggatgcgggcacggtgcagggcaatgaactccagctgccgccgcgcgcggtgtattgcgcccgacgcagctga

SEQ ID NO: 536072 - DNA, 2757 bp, Stenotrophomonas maltophilia
atgttgaaccacaagcgcagcgcgctgagcatcgcgctggccgttgtcctggcgccgacgctggcgtcggcacagtccacgcagagcaccaccacgccggccggcaccgccgccaccaacctggatacggtgcaggtcaccggcatccgccgcggcatcgagagcgcgatcgcggtcaagcaggatgccacctcggtggtcgaagcgatctccgccgaagacatcggcaagctgcccgacgtcagcatcgccgagtccatctcgcgcctgcccggcctggccgcgcagcgcgtggcgggccgtgcgcaagtgatcagcgtgcgcggcctgtcgccggacttcgccaccaccctgctcaacggccgcgaagtggtcagcaccggcgacaaccgcggcgtcgagttcgaccagtacccgtccgagctggtcaacggcgtgacggtgtacaagaccccggacgcggcgctggtcggccagggcctgtcgggcaccatcgacatgcagaccgcgcgcccgctcagcttcggcgagcgcgtgatcgcggtcagtggccgctaccagaagagttcgctgggccgcgccgccaacgtcgacccatacggcaaccgcttcagcgccagctacatcgaccagttcctggacaagaccctgggcatcgccatcggctacgcgcacagcgacatgccgatccaggagaaccaggtcggcctgtacgagccgtggaccaccgagcacaccgacaagggcgaccgtccgggcgtgggcgtcggcacctacttctccgatggcatcaaggcgctgcgccgcaccggcaacaacaagcgcgacggcgtgatggcgacgatccagttccggccgaacaacagctggaccagcaccttcgatgccttccacaccgaagccgagcagatcgacaccgccaaccagttcgagctgaacctcagcaactacaacggcaactacaccccgggcctgctggtcagcaacccgcaggtcaacgccaatggctcgttcaccggcggcaccgccagcggcgtgtatccgctggtgcgcggcatgtacaacaagcgcaaggacaagatcgatgcgttcggctggaacaacgagttcaacttcggcggcgtcaagctggtcgccgacctgaactactccaaggccacgcgcgatgagctgaacctggaaaacaacctgcagctgaccccgatgccacagctggatacggtcggcgtgtcgatccgccagaacggcttctcgcagatcagcccgggcctgaactactccaatcccgatgcgctgttcctgaccaacaccatctacggctccggctacggcaaggtgccgcaggtggaagaccgcctgaagggtggcaagctggccgccaccatcgcgctgcccgatgccatcgcgtcgtgggcgccggacatcgacatcggcgtgaactacgccgaccgccgcaaggtgaagacccagtccgaaggcaacatcctgctgggtgcgcagggcgatgccaacatcgcctcggacctgcagtatcgcccggtcaacctcggcttcgccggcctcggtaccatcccggcctggaacgtcccggccgcggtcggccgctacatgaccttcaacccggtcgacaacctggactacctgattcccaagtcgtggacggtgcaggagaagatcaccaccgcctgggcacgcctgaacatcaacgccgacatcggcgacgtcggcgtgcgcggcaacatcggcgtgcagatgcagcacaccgaccagagctcggattcgcgctactgggacagctcgcagtcggccggcaataacgtgcagccgtactcgaacggccgcacctacaacgattggctgccgagcctgaacctggccttcctgttcccgcaccagcagacgctgcgcttcgccgtcgccaagcaggtcgcacgcccacgtgtggaccagatgcgcgccggcctggagttcggcgtggacaccggcaccggccgccccggcggcagcggcggcaatccgctgctggacccatggcgtgccaccgcgctggacctgtcctatgagaagtacttcggcgagaaggcctacgtggccgccgcgatcttctacaaggacctgaagagctacgtctacacccagtcggtcgataactacgacttcaccgcgctgctgggcagctacgtgccgccgccgggcatgaccgcaccggtgctgaccaccggcaccttctccgcgccgcagaacggcaagggcggcacgctgaagggcctggagctgaccgcatcgttcccgctggagatgctgaccgacagtctgcgcggcttcggcgtgcaggccagcgcgaccttcaacaagagcgacatcaccatcctggatccggagagcgcctccagcgtgggcagtgacccgatcagcctgccgggcctgtccaagcgcgtgtacaacttcactgcctattacgagcgcagcggttttgaagcacgcgtcagccagcgccgccgatcggacttcatcggtgagatcggcaacttcaacggcaaccgtagcctgcgctacgtggttggcgagaacgtgaccgatgcgcaggtcagctacaccttcagcgacagcagcgccctgcgtggcctgaccctgcttctgcagggcagcaacctgaccaacgagccgtaccgcacctacgccggcagcaaggaccgcccgctggagtacatcgagtggggccgcacctacatgctgggcgtgaactacaagttctga

SEQ ID NO: 536073 - DNA, 2061 bp, Stenotrophomonas maltophilia
atgtcacccactgctgtacgcgcggcaatcgcgcacctgctcggcctggccctgctggcctgggccacgctggcacaggccgcgccacaggtcgcgccacaggtcgccagcatcgaatcacccggcaaggtgctgaaggtcagcctggtgctggacggcggcaccgcccgctaccgcgtcgagcgtttcggcgagcccgtggtggaggattcaaagctcggcttcgccctgcgcgatggccgcctggaccgcgatttcgccctgctcggccagcagcggcgcagcgtcgacgacagttgggagcagccgtggggcgagcgccgggtcacccgcaaccacttcaacgagctgaccgtgcagctggccgagaccacgggcagcaagcggcggctggatgtggtgttccgcgtctacgacgacggcctcggcttccgctacgtgttccccgagcagccgaacctgcgcgaagcgatcatcgatgacgagctgaccgagtttgccatcgcacaggattccaccgcctggtggattcccgccggcgaaccgatccattacgagtacctgtaccagcgtaccccgctgcgcgaagtgccgcaggtgcatacgccgatgaccctgcgcagccgcgatggcctgcacgtggcgatccacgaggctgcgctggtggactacgccggcatgtggctgcgccgcaccgagggccagcgcctgcgcgcgcagctctcgccctcggccgaaggctggaaggtgcgccgtgccctccccttcgccacaccctggcgcacgctgcaggttgctgaccgcgcgggtggcctgatcgaatcggacctgatcctcaacctcaacgaacccaatgcgctgggcgacgtgagctgggtgaagcccgccaagtacctcggggtgtggtggtcgatgcacctggacaacgagagctgggcgaccgggccgaagcatgcggccaccaccgccaagacgaagaaggtgatcgacttcgctgctgcgcacggcttccgcggcgtgctggtggaaggctggaatccgggctgggacggcatgtgggtgggtaatggctacaactttgatttcacccgcgccacgcccgatttcgatatcgaagcgctgtcggcgtatggcctgaaaaagggcgtgcacctgatcggccaccacgaaaccggctgtgcaatcgagcactacgaggatcagttgggcgccgcgctggacctgtacgcacggctgggggtggaccagttcaagaccggctacgtctgcgacgatggccaggtcgaccggcgaaatccggctggcggctcgctctggcgcgagtggcacgacgggcagttcatggcccgccaccatctgaaggtggtgcaggaagcggcgcgccgccatctgtcggtgaacccgcatgagccgatcaaggacaccggcctgcgccgcacctaccccaactggatctcgcgcgaaggcgcacgcggcatggagtacaacgcctggggccagccgccgaacccgccggagcatgaggtcaatctggtgttcacccgcatgctggccgggccgatggattacacccccggcatcctcagcctgaagggccgccacggccaggccattcccagcacgctggcgcgccagctggcgctgtacgtggtgctgtacagcccgatccagatggccgccgacctgcccgagcactacctgcagcatcgcgaggcgttccgcttcatcgaagacgtggcggtggactgggagcagagccgcgtgctcgatggcgaggtgggcgactacgtgacgatcgtgcgccgcgaccgcaacagccgcgactggttcctcggcagcatcacggatgaacacggacgcgtgctgccggtatcgctgggcttcctggagccgggcgtgcgttatcgcgccgagatctaccgcgatggcgaggacgcggatttccgcagcaatccattcgcgttcgcacgcgaaacccgcgaggtgaccagcgccgatgcactgacgctggtactggcaccgggcggtggccaggccattcgcttcacgccatcggattga

SEQ ID NO: 536074 - DNA, 2193 bp, Stenotrophomonas maltophilia
atgctgaagatcatttgcctgaccgctgccctcggggcagcgctgggatcgaccgcgcaggcggccgacctgcaattcgacggccgccaagcgcgcgccgaagccgctgccaacggcagcttcgtgctgcatgcgccgaaaggtgaggtgcgtatcgcgcccatgccgatgcgcagccagaccggtagcatgatgttcgacgcgttgtttgcgctggcccagcaggagatggaccaggaccgtgtgggcgcgattcgcgaccccgcgttcgacgagggtcggccggtgccgtgcgagtgcttccagaccggcgcgcgctggccctatgtgtggacccgcgatgtcagcttcgccgccgatctggcgctggcgcggttggacccgcaacgcacccggcagtcgctgcagttcaagctgtcggcggcccgcgatggtcacacgcccggcctgttcgtggcgcaggacaccggttccggtggcagctggccgatcagcagcgatcgcgtggtgtggttcctggcggcacgtcatctgctggaggatcgcgcgtttgccgaccaggtctggcaggcgctgcagggcacgctggcgcaggaccgcgcgatggtgttcgacgcgcaggtgggcctgtaccgtggcgagacttcgttcctggactggcgcgagcagacctatccggactggacccgtgaggacgtgcgcttcatcggtgattcctacgcactgtccaccaacgtgctgcactaccaggcactgcgcctggccgaacgtctggccggccagcgcggcgatgcccgcgcggaccagtacaaggcgtgggccgatgcgttggcgcagcaggtcgatgcacgcttctggcgcgaagacatcggccagtacatgagttacatcggtgaagccgcgcacccggtgccgtacgccaaggtcgatctgctcgggctgtcgctgggcattctggccgaagtgctgcccccggagcgtgcacgtcgtgcgctggccgcttacccgatggggccggctggcagtccagtggtctggccgcaggagtcgcagcagccgatctaccacaaccgcgcgatctggccgtttgtcagcgcctactcgctgcgtgcggcgcggcagctggacgatgcaccgcgcatcgccgccgagatccgctcgttgatgcagggcgctgcgctggccggttccaacatggagaactacgagctggtcagccaggccgtgcatgtcgaggaaggcgcactgagcggcccggtggtcaattccgaacgccagctgtggtcggtggccggttatctgtcgatggtggtcgaaggcgtgttcggcgtgcaggacgatggccgcgtgcagcccaagctgccggccgcgctggtgccggaactgttcggcacacattcccgtatcacgttggaagccaacggcaagcgctatgtgctggagcgcccgcagaacgtgggcgatggcctgctggtggccggcagaaccaccacgcgtggcagcaccacgacagtgcagctggtcgccgccccggcagcaaccggtttcgctgccacggctgcggatgccaacgtgcgtgcgccggccacgccggttgcgccgcaggccccgcgcaagggcacgggctggaacgttccggtggcagccgatcaggtgctgtggaaggacggcaaggcggtcaccgccagcaacggcgtggcgcgcatcaacgacgatggcctgcagcattgcctcagcctgacccggcgcgaaggcacgttggaatcgctgcacagcccgatgctctgcgtcggtccgcagcaggtgctgaagggcgaggaacgctggcagttcacctcggccaaggccgggcaggtgcgcctgcgcctgcagtaccgcaacccgaacgggccgatcaacaccggcgtcacggctgcagtcaagcagctggtgctgcagtgcccgggccagcctttgcagcggcatacggttgcgatgccgcacagcgtggccgtgcaggactcgacctcggcaacgttcgccgtgcacaaggggccgtgcacggtcgcgcttgaagaaggcttcaacatgagcgcgctgcagcatttcgcgcactacaccggcggaaagggcgggcgcgacggcgtgctcaaccaggcgcaggtgcaggcgttgaaggtgacgcaggtggcggcggaagaggacgcacgatga

SEQ ID NO: 536075 - DNA, 1488 bp, Stenotrophomonas maltophilia
atgaatcgtcccgccaagccacaactgtcgttctggcagatctggaacatgtgtttcggcttccttggcatccagttcgggttcgccctgcagaacgccaacgccagccgcatcttcgagacgctgggcgcggacatcgacgcggtacctggattgtggatcgccgcgccgctgaccggcctgctggtgcagccggtgatcggttacctgtccgaccgcacctggacccgctgggggcgccgtcgtccatacttcatgatcggtgcggtgctgaccacgctggccctgctggtgatgccgaattcgccaacgctgtggatcgccgccggtacgctgtgggtgctggatgcctcgatcaacgtatcgatggagccgttccgcgccttcgtcggcgaccagctggcgccacgccagcgccccaccggctatgccatgcagagcttcttcatcggcgtgggcgccatcgtcgccagcttcctgccgttcatcctggcccacttcggcgtcgccaatacggccgccgcaggtgaagtgccggacaccgtgcgctatgcgttctacttcggcgcggtggtgctgctggcggcgatcacctggacggtggtcagcacccgcgaatattcaccggcggagctggccgggttcgatgatgccgagccgccggcacattacgcggcggcgacgatcagcggtccggcgccctggacgcaggtggccgtatggctggggctgggcgtgctgctggcgctgctgatcgcgtggcggcagggcgaccggatgctgtacgtgctggccggcctgtgtgccggctacggcctgctgctggccgtggcccgcgcgttgcctggcacgcatatgctggccgccattgtgggcgacctgcgggcgatgccggtcacgatgcggcggctggcctgggtgcagttcttctcgtggttcgcgctgttcgccatgtggatctacaccactgccgcagtggccggtgtccacttcggttcggacgacccgaagacggcggcctacaacgagggcgccaactgggtgggcgtactgttcggcgcctacaacggcttcgctgcgctggccgcggtactgattccaccgatggtgcgtgccatcggcctgcgctggagccacctgctcaacctgtggttgggtggcgccggtctggtctcgctgatgttcatccgcgacccgcactggctgctgctgtcgatggtcggcgtcggcttcgcctgggcgtcgatcctctcactgccctacgcactgctgtccgacagcgtgccggcgtcgaagatgggcgtgtacatgggcatcttcaatttcttcatcgtgatcccgcagctggtcgcggccagcgcgctcggttttgccctgcgcgcctggctgggtggtcaaccgatgcatgtgctggtgctgggcggctgcagcctgttcgtcgccggcctgtgcgtgctgcgggttccgtcccgtccggaggtggtgtga

SEQ ID NO: 536076 - DNA, 1713 bp, Stenotrophomonas maltophilia
atgcgtggtgtgctgtctgttgctgtttccctggtgctggctggtcaggcggtggccgcgccgcgtccggactacgtcggtaccaccgaaccgttcgccagtgatgcggtgtatttcgtggtcaccgaccgcttcgtcaacggcgatccgtccaacgatcaccgcgaccagggcggcaagcaccgcaccttcgatatcccggtgccgtgcccggacaaggtggacggcaacatcggttacctcggtggtgatttccgcggcgtgctcgacaatgcgcagtacatccgcaatctggggttcggcgcggtgtggatcacgccgatcgtggacaacccggacgaagcctttaccggcagcaagccgatcagctgcaccagcacgctgaccgaccgtggcaagaccggctaccatggctactggggcatcaatttctacaaactcgatgaacacctgcccagtaaggacctggactttgccggattgaccaagggcctgcacggtgctggcttgaaggtggtgctggatatcgtgggcaaccacggttcgccggcctggaccatgccgacgcggcagccacagttcggccagatcttcgacagggatggaaaactgattgccgaccaccagaacctgcccccgcagaaactggatccgaagcacaacccgctgcacgcgttctacaacaacgttggtccggtcgacagcaaggatggctcgatcttcgatggcaacctggccgagctgtccgacttcaaccaggacaatccggcggtaatggactacctggtcggcgcctacctgcagtggaccgcgcagggcgtggacgcgttgcgcatcgacaccatcggctggctgccgcacccgtggtggcatgaattcgtcaagcgcatccgcgccgagcatccgggcatgttcatgtttggcgaagccttcgactacaacgcggcgaccattgccgagcacacctggccggccaacgccaatgtcagcgtgctcgacttcccgctgcgcggtgcactggagcagaccttcggcaccgccggcaagggctttgaaacgctggccgagccgctgcacctgagcggggggccgtacgccaacccgtacgagctgatgagcttctacgacaaccacgacatgccgcgcctgcaggccagcgacagcggtttcatcgatgcgcacaactggctgttcaccgcgcgcggcattccggtggtctattacggctcggagaccggtttcatgcgtggccgcgccgagcacgccggcaaccgcgcctacttcggccagccgcgtgtggatgcggcgccgaagagccccatcttcgcgccgctgcagcgtatcgcgcgactgcgtgaagccaccccggcgctgcagcgcggcctgcaggtgaacgagcgcctgcagggtgatgaggcggtgttcttccgtgtgctgcagcagggcgaggtggcgcagaccgcgctggtgctgctgaacaagggcgaccaggccaggagcttcaccgtggcgcgttacgtccaggctggccgctggcgtgatgcgctggacggcggttcgttgcaggtggatgcctccctgaaggccgaagtgcccgcgcatggcgtgaaggtgtacgtgctggatgccgccgtgcagcagccagcgctgcaggccgagctggacaaggcgatgaccgaccagaaggctcgggaccagcgtctgggacgatga

SEQ ID NO: 536077 - DNA, 387 bp, Stenotrophomonas maltophilia
atgaccgacctcgctccgcagaccccgatcgaaaccctgctgaaggcggcgatggacggggcggtgccgatccgcgccttcatggaggccttcgtcgcttccgaggtcgtgctgctgaccggcagcctggtcacgcccgacggcagcggcttcgacccgctgctgttcgacaagcagggcatcctgcacgtggccgtgttcaccgatccatcgcgggtgggcatctacagccagcaggcccaacaccagatccgctggttgatgctggacgttctgcgccgcgtgccggggggctacggcgtggtgatcaacccaggcaccccgctgggcttcgagatctcgcccagcggcgtcggcgagatcctgaaggacttcgcccagggctga

SEQ ID NO: 536078 - DNA, 318 bp, Stenotrophomonas maltophilia
atggaattgagggaactacctgccggctcaccagcacgatcacgccattcccgctccgcactgatcttcctgatctcagcgatcgctgccgcgctggtgtccatgcccctgctgcgcgcggtgggcatggtgctgtggccggtgttcgtcattgcctggctgatcaacctgggcgcggcctggcatctggcccagtgggcacgccagcagggccgttcggcgtgggggttcgggttgccggcagcgttcggcaccgtcgcctcgatcgtggtctatgtgctgctggcattgctggggccgaaggccgcggtgcactga

SEQ ID NO: 536079 - DNA, 3585 bp, Stenotrophomonas maltophilia
atgatcctcaacttcttccgcttcgagctgcgcgagcagctgcgctccccgctgctgtggctgctggccgggctgttcgccctgcttgccttcgccgccgcgtccagcgacgcggtgcagatcggcggtggcgccggcaacgtgcacagcaacgcgcccaccgtgatcgcacagatgctgggcatcttcaccctgctcggcatgctggtcaccgcgctgttcgtcagcaacgcgctcttgcgtgacttcgaactcggtaccgctgaactgatcttcgccagcccggtgaaacgccgcgactatctggccgggcgcatcgccgccgccctggcggcaggcctgctggtctacgtgctgatcgcgttcggcctatggctggcaccattcatgccgtgggtcgatcccgaacgcatgggcccgatcagctggcagggctatgcgtggacgttcgcagtcatcgtcattccgaacctgttgttcaccaccgcgctgctgtcgctgctggcggcgctgacccgctcgatcctgtgggtctacatcggcctggtggcctacctggtgctgtatggcgccagcgcggccctgctgcgcgacatcgacaacacgtggatcgcggtgctgagcgaaccgctgggcatgcgcgcactgggccgcacgatccgctactggtccaccgccgagcgcaacaacgggattcccgagctggccggttacctgctggccaaccgcgccctgtggttgggtgtggctgccgtactgttcgccgccaccttcgcgctgttccgcaccgaacgcagcggcagtggccgtcggcgctggggccgcaggccggcgcagccgattgccgatgccgccggcatccgccccagccgcgcgacactgccgcgcgtggtaccggcgttcactgccaccaccgcgtggcagcagttcctgcgccaggtccgcttcgatacacgcggcgtcctgcgcagcgtgccgttcatcgtgctgctggtactgggcctggccaacttcctgcccagcgcgctgttccggcagaccctgtacggcacctcgatctggccggtcacctcgcagatgatcatggggctgcagggcgccttcagctggctgctggtgatcatcgtgttgttcttcgccggtgagctggtctggaaggaacgcagcgcgcgcatcaatgaagtgaccgatgccatgccggtgccgaactgggtgccgctgctggccaagttctccgcactgctggccgtgatcgtctgtttccaggccgccggcgcgctggcggcgatgggcgtgcagctggccaagggctacacgcatctggagccgctgctgtacctgcgcagcctggcgctggattcggtggtctacatcctcatggggggcctggcgctggtgctgcaggtgctcaccaacaacaagttcgtcggttacgcattgctgatcgtggtgatgatcggccagggcgtgctcggcctgctcgactacacgcagaacctgtacaacttcggcagctggcccaacgcgccctattcggacatgaacggctacggccacttcctcaccgggcagctggcgttccagggctactgggcgctgttcctgctgactttgatgtgcctggcgtcggccttctgggtacggggtgtcagccagggcctgcgccagcgcctggccctggccggccgccgcctgcgtggtccgaccggcgccttcgccgcggtggccgcgctggcgttcgtcggcgtggggagctggctgtactggagcaccaacatccgcaacgagttcctttctccggaccagcagctggatctgcaggcccgctacgagcgcgagctgtcgaaataccgcaacctgccgcaaccacgcattgtcgccgtggacaaccgcgtggacctgttcccggaatcgcagtcgatggtgatcgatgcgaactggacggtacgcaacacccacgccacgccgatccaggacgtgcacgtctcgatgggcgatgacaagcagctgatcgcggtcgacctgggtgggcagacactttcgatgcatgacgccgatctcggctaccgcatctaccgcctgcagaaaccgctgcaaccgggtgaaacccgcagcgtgcatttccaggtggtgcagaagcccaacggcatcaccgccggccaggcgccgagcaacatcgtcgacaacggcacgttcttcaacagccgcgtactgccatcgttcggctacaacgagggcgcggagatcaccgaccgcaacgagcggcgcaagcgcgacctgggtgagccgcggcgcatgcccaagctggaagacgaagccgcgcgtgccaacacgtacatctccaacgatgccgactggctcgagttccgcaccacgatctgcacggcaccagaccaggtggcgctggccccgggctatctgcagcatgagagcacggtcaatggccggcgctgcttcagctatgccatggaccggccgatgctgaacttctacgcctatctgtcggcgcgctgggaggtgcgcaaggcgaagtacaagaacattccggtggaggtctacttcgacccggcgcacggctacaacgtggaccggatgatcgaagcggtgcagaaatcgctggcctactacgaggcgaacttcaccccgtaccagcatcgccaggtgcgcatcatcgagttcccgggctatgcgcgcttcgcgcagtcgttcgccaacaccatcccctactccgaggccatcggtttcatcgccgacctgcgtgacccggacaaggtggactacgtgttctatgtgaccgcgcacgagatcgcacaccagtggtgggcgcaccaggtaatcggtgccaacgtgcagggcgcgacggtgctgtccgaatcgctgtcgcagtattcggcactgatggtgatggagcaggagtacggccgccagcacatgcgccagttcctcaagcgcgaactggacggctacctgtccgggcgtggtggcgaggccatcgaggaacagccgctggaacgtgtggagaaccagcagtacatccactaccagaagggttcgctggtgttctaccggctgcgcgaggagatcggcgagcaggcgcttaaccgggcattgaagcgtttcctgcaggacaagggttaccaacaaccgccctacaccacctcgcgcgaattgctggcctacatccgcgccgagaccccggccgaccgccagcagctggttaccgacctgttcgagaagatcagtttctacgacaaccgggtgatggtcgccagcgcccgcaagcgcgatgacggccgctacgacgtgaccctggacctgcatgctgccaagcaatatgccgacggcaagggccaggaaagcgacgggaagatggatgactggatcgagatcggcgtgttcgccaacgggccttcaggcaaggaacgcgaccagaaagtgctgtacctgcagcgtcatcacatcaccagcgccaatccgaagatcacggtgaccgtggatgaaaagccggatgaagcgggcttcgatccgtataacaagctgatcgaccgggtgagcgacgacaaccggcgcaaggtgacgatgtga

SEQ ID NO: 536080 - DNA, 903 bp, Stenotrophomonas maltophilia
atgctgaagatcgattcgctgtccaagacgtacgccaacggcgtgcatgccctcaacaacgtcaccctggatatcccgcgcggcatgttcggcctgctcggtccgaacggcgccggcaagtcgtcgctgatgcgcacgctgtccaccctgcaggaagccgacagcggcacggccaccctcaccattcccggcgaggcgccgatcgacgtactgcgcgacaaggacgcggtgcgccgccggctgggctacctgccgcaggatttcggcgtgtacccgaaagtcagcgcgctggacctgctggaacatttcgcggtgctcaagggcctgacccagcgcgcgcagcgccgcgaggtggtcgatggactgctgcaacaggtgaacctgtgggacgcgcgcaagcgcaagctcggcacctactccggcggcatgcgccagcgcttcggcatcgcccaggcgctgctgggagacccgcggctggtgatcgtcgatgagcccaccgccggcctcgacccggaggaacgcaaccgcttcctcaacctgctggcggccatcggcgagaacgtggcggtgatcctgtccacccacatcgtcgaagacgtgaccgatctgtgcccgacgatggcgatcatgaacaagggccaggtgctgctgaccggccgccccagcgaagcgatcgacgccctgcagcaccaggtctggcgcaagcaggtcgatccttcggaactggccgaccacgaggcacgctacgtggtgctgtccacccgcctggtcggtggtcgcccggtgattcacgtacacagcgccaatgaccccggcgacggcttcgccgccgtagcccccgacctcgaggacgtgtacttccagcgcctgcgcctgcaggcccgtgcccgcgcggcagcctga

SEQ ID NO: 536081 - DNA, 1032 bp, Stenotrophomonas maltophilia
atgacgatcaaaggcaaagccacctccctggacatcgcccacctggccggggtctcccagccgaccgtgtcgcgggccctgcggggcagcccgatggtcaatgccgagacccgcgagcgcatcctgcgcatcgcccgcgagctgaactacaaggtcgacaagaacgcctccagcctgcgcctgcgcaacgccggcaccctggccttgctgttcttcgaggacccgaccaacgacgattcgctgatcaacccgttcttccattcgatgctgggctcgatcacccgcgcctgcgcgctgcacgggcaggacctgctggtctcgttccagcaactgtccaccgactggcaggccgattacgaggacagcaacaaggccgacggcatcatcctgctcggctacggcgactaccacgaatcgcgcgaccgcctgcagcggctggtcgaacagggcacgcacttcgtgcgctggggcgccgccctgcccggccagcccggcgtgtcgatcggcagcgacaacttccagggcgggcacgacatcaccacccacctgctgcagcagggctgccgccgcatcgccttcctcggccatgcctccagccattaccccgaattccaggagcgctaccgcggccatgtcgcggccctgcaggaccacggcctggccgccgaaccggcgttgcagcacgatgcgatcaccaccgaggcttccggccaggaggcctgccaggcgctgctggcgcgcggcgaaccgatcgatgcgatctgcgccgccagcgacctgatcgccatcggtgcgatgcgcgccctgcgcgaggccgggctacgggtgccgcaggacgtggcggtgaccggcttcgacgacatcccgctggcggcctcggtatccccggcgctgaccacggtccagcaggacaccaagcaggccggccagctgctggtggagcgcctgctgacgctgatcggccggcaaccggtggagggccagagcatcccggtgaagctggtggtgcgggaatcgtcgctgcgccggtaa

SEQ ID NO: 536082 - DNA, 396 bp, Stenotrophomonas maltophilia
gtgtcttttcgcctgtacccggatgttccggatgatttcgaggcgcggatccgtatcctcgcgccggaggagggcgggcgacgcagcccggcccggaacggtatccgctgggacttcgcctacgccgctgacgccggggcgccagagctgttcatgatctggcccgacttccggcacgccgagggcgacagctgggcgaccgagctgccgctgccggtgggcgagcccctgttggccggcctgaccgtggtcaatgaggtgctcagggcggggctgcaccgggagcgtatccggcccggcgtgcgcttccactgccatgaagggcccagggtggtggcggtgggggaggtcacacgggtcaccggcttgctgctggatcgccccctgcttcgttga

SEQ ID NO: 536083 - DNA, 576 bp, Stenotrophomonas maltophilia
atggcgcgcggcatcaacaaagtcatcctggtcggcaatctcggcaacgacccggacgtgaagtacacccagagcggcatggcgatcacccgcatcagcctggccaccaccagcgtccgcaaggacaaggatggcaaccagcaggaacgtaccgaatggcaccgcgtggtgttctttggcaagctcggcgagatcgccggcgagtacctgcgcaagggcagctcggtctacgtcgaaggcagcctgcgctacgacaagtacaccggccaggacggcgttgagaagtactccaccgacatcgttgcagatgaaatgcagatgctgggcggccgcggtgaaggcggcggcggtggcggtggtggcaactacggcggcgatcgcccgcagcgtcagcaggcgccgcgccaggagtacggtggcggtggcggtggccagcgtggcggccagggcggtggctatggcaaccagggcggcaaccagggcggcggttacggcaaccagggtggcaaccagcgcccgcagccgcagcaggctccgccgatggacgacttcgctgacgacgatattccgttctaa

SEQ ID NO: 536084 - DNA, 954 bp, Stenotrophomonas maltophilia
atgccctataatccgaatgggttatgtcgaaaagtctacctaatgcgcggatccgagttcactgaactgaaggctttcgtggcggtggtggaacgccagagcttcgcgcgggctgcggaacatctgggggtatcgccctcggcgctgagccagaccatccgccaactggaaggccgcctcggcacccgcctgctcaatcgcacgacccgaagcgtcgcgccatcagcaagtggcgggcgactgtacgcgcgcatagcgccgctgttcgaggagttggccgtagcggtcgctgaaacccgcgaggcgaccgggcgggtgaatgggacgctgcgcatcaatacgctgggcatcgccgcgagaacactgattgccccgcggcttgcccgcttccaccaggcctaccctgatgtcgttgtcgacatcgtggtcgacgacgcgctcagcgacatcgtcagtgggcggtttgatgcaggcatccgcgtgggcgggcagctcgagaaggacatggtggccatccgcctcactcccgacctgaacatggtcgccgtggcgtcaccggattacgtcgcacgccgtggaacgccgcgatctccaacggaactgcaggaccatgcctgcatcaactggcggctgcagagtgacggcaggcagtaccgatgggagttcaagaagcgaggccgccacctggaggtcgccgtggacggtcctgtcgtcaccaatcacgctgacgtcgggattgcggcggcactggccggccttggaatcgcctatcacttcgagcaggatcgcgtgggggaactgctggcccagggattgctggtgcgggtactggcggattggtcggtctcgcgccccgggctttttctctactacccgaacaggcggcatcgccccgccctgctgggggcgttcattgattgcctgctggaccagggcgtgttcggcaatcggtga

SEQ ID NO: 536085 - DNA, 327 bp, Stenotrophomonas maltophilia; identical to SEQ ID NO: 507475

SEQ ID NO: 536086 - DNA, 783 bp, Stenotrophomonas maltophilia
atgagcttcgatcttcaactcggtggcctgcgggccgtggtaaccggcggcacgttgggtgtgggggctgcggtggtcaggaccctggccgaggccggggcccgggtgatgacgtctgcgcgcagcttgccggcacggccggtcgaaggggtcgcgtacgtggcagccgatctgtcgacggccgagggcacccgcatcttcgcccaggccgttctgcaggcgtgggacggtgccgacatcctgatcaatgtgcttgggggatcaaagacaccaggcggcggcttcgcggcgatcagtgatgcgcattggtttgccgagctgaacctcaatctgatgccggcggttcgtctggatcgcgccttgctgccggccatgctcgcgcagcgcgctggcgtgatcatccatgtcagttcgatccagcgcatgctgcctctgccggagtccaccaccgcgtacgccgcggccaaagcggcacttacgacgtacagcaagtcgctttcaagagaggtcaccgccaagggcgtgcgcgtgctgagcgttgcgccgggctgggtcgagacagaggcttcccgggaatttgcagaacggatcgcggcagaagcaggaaccgattatgaagggggcaagaggctggtcatggactggcttggggggatcccggtggggcgccccgcggcaccgcaggaggtggccgatctgatcacgttcctggcgtctccccggtctgcctcgatttccggaacggagtatcggatcgacggcggcacggtctcgaccctgtag

SEQ ID NO: 536087 - DNA, 906 bp, Stenotrophomonas maltophilia
atgtccgtccattcgatcagaccggccccggcgacggggctcacgcggcgcgatgcgctgcgcatcgcagttgccggcagcattggcctgggggccgcgacaatcgcgggcacgctgcccgcatccgccgccaccgcgccgctcaaaggcaacctgaagcactccgtcgcccgctggaccttcccgcagctgtccgtcacccagctctgcgcgacggtgaaggacatcggcttcgccgcgatcgacctgatcggcccggaagactggccgacgttgaaggcccatggcgtgtacagctcgatgtgcaacggcgcggagctgggcctgaccaagggctttgccgggcgccagttccatgaccagttggtggagcgctacacgcggcacatcgatctggtcgccgatgccggctatcgaaacctcatctgcttttccggcaaccgcaacggcatggaccccgccgaaggcatggccaatgccgaggctggcctcaagcgcatcctcgggcatgccgagaagcgtggcgtggtgctggtgatggagctgctcaactccagggtcgatcaccacgactacctgtgtgaccactctgcctggggcgtggagctgtgccagcggctcggctcggacaacttcggcctgctctacgacatctaccacatgcagatcatggaaggcgacatcatcgccaccattggaaaacaccacgcctgcttcaagcattaccacaccgcaggcgtgccaggccggaacgagattggagaccagcaggagctccactatccggccatctgtcgcgcgatccgcgacactggtttcaaggggtatctggcgcaggagttcacgcctgcagcgcccgatcccgttgcctcattgcgcgaggcgatccgcctctgcgacgtctga

SEQ ID NO: 536088 - DNA, 1686 bp, Stenotrophomonas maltophilia
atggcagataatcactacgacgccattgttgttggctcgggaatcagtggcggttgggcggcgaaggagctgaccgaaaagggcctgaaggtcctgatgctggaacgtggccgtaacatcgagcacgtcaaggactacgtcaacgcgatgaaggaggcgtgggacttcccgcatcgcaatcggccaacgcaggcgatgaaggccgacttcccggtgctgatgcgcgattacggcctggccgagaatctggaaggaatgtgggccaacgaacaggactcaccctacatcgagaccaaacgtttcgactggttccgtggctaccacgtcggcggccgctcgctgctgtgggggcggcagagttatcgcttctccgatctggatttcgaggcgaacctcaaggatgggatcgctgctgactggccgatccgctacgccgacatcgcgccgtggtacgactacgtggaaaagttcgccggcatcgccggcacgcgcgaaggactggacgtgctgccggacggcgaattcctgccgccgattcccttgaacatcgtcgagaaggatgtggccgcgcgtatcaagaaggcctttggcggaacgcgccgcatgatccactcgcgcaccgccaacatcaccaagccgatgcccgagcaggggcgcgtcaactgccagtaccgcaacaagtgcatcctgggctgtcccttcggtgcctacttctcgacccaggcggcgacgctgccagcggcgatgaagaccggcaacctgaccttgcgtccgttctcgatcgtcaaggaagtgctctatgacaaggatcgcaagcgtgcccgcggcgtggaggtcatcgacgccgaaaccggccagacctaccagtacaccgccaaggtgatcttcctcaatgcgtcgtcgttcaactcgacctggctgctgatgaattcggcgaccgatgtatgggacggcgggctgggctcttcgtccggtgagttggggcacaacgtgatggatcatcatttcggtgcgggtgcctcgggccgggtcgagggctacgaagacaagtactacttcggccgccgtccttgcggtttctacattccgcgcttccgcaacgtcgcagccgacaagcgtggctacctgcgcgggttcggctaccagggcggtgccagccgaaacggctggtcgcgcgagatcgccgagctgaacatcggcgccgacctgaaggaagcgctgaccgtgccgggtgactggcgcatcggcatgaccgggttcggtgaaatgctgccgcaccacgacaatacaatccgcctggaccacgaccgcaaggacaagtgggggctgccggtgctggcgatggacgttgccatgcgtgccaacgaactggcgatgcgcaaggacatggccgccgatgctgccgagatgctggaggcggccggcgtcaaggacgtgaagatgcacgacaacgactatgccccgggcaagggcatccacgagatggggaccgcgcgcatgggacgtgatcgcaagagctcggtactgaaccagcacaaccaggtctgggatgctcccaacgtctatgtgaccgacggtgcctgcatgacctccagcgcctgcgtgaatccctcgctgacctacatggcgctaaccgcgcgcgcggccgaccacgcggtacgcgaactgaaagcggggaacctctga

SEQ ID NO: 536089 - DNA, 576 bp, Stenotrophomonas maltophilia
atggatcgtcgcgaactgctgaagatgatcgtcgccgccaccggcgcggccatggttggattgcctgcgcttgtgcaggggcaggcaccggcgggcgccacgaagatccatttctccgatgccgatgtcggcacgctggacgagatcgccgagaccatcctgccgcggacccggacacctggcgcgaaggacgccggtgccgggttgttcatggcgacattcgtcagcgattgctacaccgcccggcagcaggcggcgtttcgcgccggcctggccgacatcgacaaacgcgcaggtggccgcttcgtatcgctcacaccggaagcccgcgccgggttgctgcgaacgctggacgctgaagcgaaggcacgccctgccgacgtgaccgagaccggcacaccagaagagggcgaggcgatgccgcactacttcacgatgctcaagcagttggccatcttcggcttcttcacctccaaggtcggcgcgacaggggtgctgcagtacgtcgcggtgccgggccgttacgacggcgaccttgcctatgttcccggcacgccggcgtggggaaccagctga

SEQ ID NO: 536090 - DNA, 759 bp, Stenotrophomonas maltophilia
atggacgatattctgatgatccgctctctgttgatggccaccggcctgctggccgcagtacctgccttcgcgcagaacggtgccgacgctgcgcgtgacccgaagaagaccgaggtgtggacgccggtgcctgcagtcgtggaaacgcccgcgggcaaagcgccgtccgacgccatcgtgctgttcgatggcaaggatgtctcggcgtgggaggcagagcagggcgggcgcgtgccctggaccgtcgccgatggcgcgatgaccgtggtgccgggcagcaaaggcatccgcacccgacagcgcttctgcgatgtccaggtgcatgtcgaatggcgtacccccaccgagacgaagggcttcgacggccagaaccgcggcaacagcggtatcttcctgcaggaactgtatgaactgcaggtgctcgacagttacaacaacccgacgtatgccaacggccaggcgggttcgatctacaagcaggccatgccacgggtgaacgcctcgcgcgcacctggccagtggcaggtttacgacatcatctggaaggcgccgcggttctcgcagggcggcggcctgacgtcgcccgcgcgcatcaccgtgctgcataacggcgtgctggtccaggacgacaccgtgctggcaggcaagaccgagtacatcggtgcgccttcgtacgcgccccatgcgtgcgcgccgctctatctgcaggagcatgactccaaggtcagctaccgcaacatctgggtgcgcgaactgtag

SEQ ID NO: 536091 - DNA, 309 bp, Stenotrophomonas maltophilia
ttgaacactcgcctgaaattgagcttcaccctgaccgcggtcctgtgcggcgcgatgcttgcgaccacggcctggtgcaaggacgaccctgcggccggtgcgaagctctacagcgcaaactgcacggcctgccacggtgccgatcgcgctggcatgccgggtgcgtttcccgcgctcaccgacatcagcaaacgactgcagccggcgcagatcaaggacaagatcaggaagggcggcggattgatgccgcccttcccgcagctttcgcaacaggaaatcgatgacatcgccagctacctggcgaaatag

SEQ ID NO: 536092 - DNA, 864 bp, Stenotrophomonas maltophilia
atgaaagctcttttccgtagaagtgcaagtctcatcctgctgttcgccaccctgcccgctttcgcggacgaagccgccagcacgcagaaaccgatcgcggtgcagatgtataccctgcgcaacgccgggtcgctcgaccagcagctgaagatcgtccacgacgccggtgtgcgcgcagtggagacggtcggcacgcagaacgccagcgctgcggagctcaagcggctgctggaccggtattcgatcaaggcggtttcgtcgcatgtgccgctggccgagctgcgcaatgatctggacggcgtggtgacgttcaaccggtcgatcggcaacaccacgctggtggtgccgtacctggatgcgaaggatcggccgacagacgccgcgggctggaccgcactgggccaggagctgggcaggatcgcgaaacaggtacgagccaagggcatgcgcctggcctatcacaaccacgacttcgagctggtcgacttcgatggcagcaccggactggagctgctgttcgcagcggccggccccgacctgcagaccgagctggacctggcctgggtcgcacgtgcgggcctggacccggccgtgatgctgggaaaattccgtgatcgcgtgttcgcggtgcacgccaaggacaatgcgcccaagggccaggctgaagacgaaggcggattcgccgccgtcggccagggcgtactggactggaacgcgatcctgccagccgcggccgccgcgggcgtgcactggtacatcatcgagcacgaccagccgcgcaacccggccaaggtcatccagaccggcgcggactacctgcgtgaacacctggccatcgaccaacctgctcgcgcaccgcgctga

SEQ ID NO: 536093 - DNA, 1125 bp, Stenotrophomonas maltophilia
atgcccaagcttggaatcgccatcgtcggcgccggcatgatcggcgcagtgcatcgtcgtgcggcactgctggcgggtgccgaggtacgcggcgtggccgcctcgtcaccgcagcgttcacatgaggcagcgcagtcctggaatgtcgcgcgtgcctatcgggatatcgaggaggtcatcgccgacccgcaggtgcaggtcgtgcacgtgtgcacgcccaatcacctgcaccgcgcgatggcccaggctgcgctggaagccggcaagcacgtgatctgcgagaagccgctggccacctcgctggaagatgcacaggcgttggctgcgctggcggcctcgcgcggccttgtggccacggtgcccttcgtctaccgctaccacccggtggtgcgcgaggcgcgcgcccgtatcgcccacggtgaactggggccgttgcacctcatccacggcagctacctgcaggactggttgttggacccggccagcaacaactggcgcgtggaccccgcgctgggaggcacttcgcgtgtgttcgccgacatcggctcgcactggtgcgacctggtggagtggatcagcggcgagcgtttcgccgaggtcagcgcggcgttctccacggtaatcgccgagcgcggcgccgtcagcggacagagcttcagcacgccaacggccgccagcacgatgcaggccgtcacgagcgaggacgtggccgcggcgatgttcaggaccggcgccggcacgctggcgtcactgacggtcagccaggtctcggccggacgccacaaccgcctctggttcgagatcgatggcgcaaaggccagcgtggccttcaaccaggaggatgccgaacggctgtggatcggaagacccgaccagcgcgaggagatcttcgtgcgcgggccagccgccggcagtgccgaacaacgccgcctttccgtgctgccggccgggcatgcacagggctacgcccagtgcttcgaagcgtttgtcgccgacacctatcgcgccattgaaggcgagcggccgcagggcctgcccaccttcgaagacggcctgcgctcggcgcagatcgttgaccgtgtcattgcatcggccaggtcgcgtgcctggaccgtcatcggttga

SEQ ID NO: 536094 - DNA, 1218 bp, Stenotrophomonas maltophilia
atgacgcacgccatgtcgcgcttgggcgcgatgatgtttctacagttcttcatctggggggcgtggttcgtgaccctgggtacctatctggtgcagggcccgctgcaggccagcgccagccaggtggcgacggcgttcctcagccagtccatcggcgccatcgtcgcgccgttcctggtcggcctgatcgcggatcgctacttcgccgcgcagcgcatcctggcggtgctgcacctggccggtgcggtgctgctgtggctggcctccacagcagacagcttcagcacgttctccgcctgcgtgatgggctacatgctgctgttcatgccgacgctggcactggccaacagcgtggcgatgcggcacatgcagtcgccggagaagcagttcccgctggtgcgcgtggccggcagcgtcggctggatcgtggccggtgtgctgatcggctggctgggctgggaacaggcgcatcggcttgaactgacgttccggatggcggcgctggcatcactgctgctgggcctgtatgccttcaccctgccgcacacgccgccgctggcgcagcagcgcgatgccggcctcgggcagatcctcggcctggattcgctgcggctgctgaagtcgcgcgcctatctggtgttcttcctggcctccatcgccatctgcatcccactgtcgttctattacaacttcaccaacccgtacctcaacgacctgggcgtgcgcggcgccgcgggcctgcagtcgctgggccaggtctccgaagtgctgctgatgctggccatgccgttcctgttcgtgcggctgggggtgaagacgatgctggcggtgggcatggccgcgtgggtggtgcgctacgccatgtttgccttcggcgatgcgggcggcggtttctccctgctggtgatcggcatcgtgctgcacggcatctgctacgacttcttcttcgtcaccggccagatctacaccgatgcacatgccggtcccgccgcgcgcagcagcgcgcaggggttcatcaccctggccacctacggcgtgggcatgctgatcggcaccttcctgtccggcgcggtggtggagcacttcaccactgcggccggccccgactggcagcagatctggctgttcccggcaggcgttgcactggtggtgctggtcgccttcctgctgctgttccgcgaccggccggcggccacggccgcgccctccacgccctga

SEQ ID NO: 536095 - DNA, 1053 bp, Stenotrophomonas maltophilia
ttgaagacgctcaagggtccagcgctgttcctggcgcagttcatcggcgacgcagctccttttgatcggctggacacgctggccgggtgggccgcgggtctcggctattctggcgtacaagtccccaccacggcgccccacctgttcgatctggcggaggccgcacgcagccaggcgtactgcgacgacctcgctggcatgctggccgggcacggcgtgcaggtcaccgagctgtccacccatctgcaggggcagctggtcgcggtccatcctgcgtacgacggcctgttcgacggcttcgcgccagcggacaagcgcggcgaccccgccgcgcgccaggcctgggcagtggagcagctgctgctggcggccaaggccagccagcgcctggggctgaccgcgcatgccacgttctccggcgcattggcgtggccctatttctatccttggccgcagcgcccgcccggcctggtggaagaagccttcgccgaactcggccgccgctggcgccccatcctcgatgcgtatgacgcctgcggcgtggacctgtgcttcgagatccacccgggggaggacctgcacgacggtgcgaccttcgaacgcttcctcgacgtggtcgatcaccacccgcgcgcgaagatcctgtacgaccccagccacctgctgctgcagcagatggactatctggggttcatcgatcgctaccacgcgcgcatcggcatcttccacgtcaaggacgcggagtaccgcgccagcgcctgcagtggcgtgtatggcggctaccaggactggatcgatcgcccgggccggttccgttcactcggcgacggccagatcgacttcaaggcgatcttctccaagttcgcccagtacgacttccccggatgggcggtactggaatgggagtgctgcctgaagcacccggaagacggcgcacgcgagggcgccgccttcatccgcgaccacatcatccgcgtgaccgagcgcgccttcgacgactttgccgacagcggcacggacgccggatcactgcaccgcatgctgggaatctga

SEQ ID NO: 536096 - DNA, 1008 bp, Stenotrophomonas maltophilia
atggccaccatctacgacatcgcaaagcacgtcggcgtctccgcaggcacagtgtcgcgggcgctttcgcggccggacaaagtcctgccggcgacccgcgcgcgtatcgagcaggctgccgccgcgctgggctatgtgcccaacacggtggcccgcacgctcaagacccagcgcagcggcaagatcctggtcaccgtcccggacatcgccaatccgttcttcgcccagatcctgcagggtgcggaggacgccgcgcaggccgttggctacgcggtcctgctgggggacacccagcatcaaccggatcgcgaggagcgctatgcgcagatgctccggcgcaacgaggccgacggcatgatcgtgctggggcatcgcctgccaccgacggcgcgtgacatcgtcgaacagcggggtgccgccgcgccggtggtcaacggctgcgagttcgatccttcgctgggcatccccagcatccacatcgacaatgccgccgccgcgcgcgcggtgatggaacacctgtatgggctgggacacgaacgcattgcggtggtcggtggcccccccgacaatccgctgcaccagcaacggctggaaggggtgcgggcggccggcaaggcgcgtggacgcctgcgccagctgaacatcgtgccgggtgacttttcggtggagtccggccatgccgccgcgatggcgatgttggccgccgcgccggtaccgactgcggtcttctgtttcagcgaccagatggcgctgggcaccctggcggcctgtcgggagctgggcctccgagtgccggaggatctgtccatcgtcggctttgacgacctggcctcctcgtgctacctcacgccgccactgacgacgatcagacagccgatgcgggagattggtgagcgcgcggtcaacctgctgcttgccatcatcgaacacgtggatgtgccgctgcagcagacgctggatttcagcctgatgctgcggggctcgacggctgcacccagggccgggtga

SEQ ID NO: 536097 - DNA, 1053 bp, Stenotrophomonas maltophilia
atgccgttcttgacggactcgaccgaggtctcggtcgaaggcatcggcgcggcacggcgcatcggctggatgcgtttcgtgggcaacgggttgggggcgatccccattgcttcgatcatgctcgaacgccaggacggtgcgctggcgtggagcctgctgctgctcaatgcgctggcctggccggcgctcgccctcgtgctgacccatcgctcgcggcagcccgcggtggtccagttccgctgcatggtgatcgattccttctttggcggtggctggatcgccttcatgggactcagcgtggtgcccagtgcattgttcgccgcgctgctggtcgccgacaagatcgccgccggcggggtgaagctggcggtacgggccacactggcgctggtagtggggttcgcgctcacctggtgggtactcgggtttccctatcagccggtgtcatcgcagcgcacgatcgtactcagtgtgccgttcctgttcgtctacggcatcggcctcagcatcctcagctggcagctggcgcggcgggtgaaatcgcagaaccgccagttgaagcggctgagccggatggacccgctggtggagctggccaaccgcggcttcctgatcgtccgcgcgcagcaggccctggacaaggcgcaggggcagggtggtttcgcctgcctgctgatgcttgatgtggatgacttcaagcgcatcaatgactcgcatggtcatcgtgccggggacgaagtgctgcgccatatcgcctccaccttgcgcgccttcgcccggcccggcgatacccctgcgcggctgggaggcgacgagttcgtcgtgctgctgcaggactgtgcgcccatcgatgcgatgcatgtggcagagcgggttcgtctgcaacttctggaagcagcacggcaggcaacgccgggcatcgagttcagcgtcagcatcggcattgctgccacgccgcggggcggcagcgtcgaggactggctggcattggccgaccgcgcgctctaccacgccaagcgccagggcaagaacaacgccagctatggcgaatga

SEQ ID NO: 536098 - DNA, 1026 bp, Stenotrophomonas maltophilia
atgcaagacgccctcgttgcccagcccaagccccccgttccgaggatcgcggcctggctgatgatgctgctgggcatgtggctggcgttgaagctgggcctggtggtgaccctgctgtcggggctgctggtgttccagctgacccacgtgctggcgtcgaccgtggaaggcaggctgccgccgggaagggcgcgggcaatcgcggtgatcgtgctgtcggcgatcatcatcagcggactggtgctggccggcattggcgtggcgtcgttcttccgcaacgagaccggtgggccggacgcgctgctggcgcggctgatggacatcctcaattcgtcgcgccaccaggtaccggcgctgctgcagccgtatatccccgaagacatgccggcgctgcgtgcggcgctgaatgactgggccgccgaacaccagcgccagctgggcgtggccggcacgtcggtggtgcaggtgggcgtgcgcgtactgatcggcatggtgctgggggcgatgatcgcgctgtatgacgaacttccgctgccgaaaatggggccgctggcgcaggaactgatcgggcgcaccagccgcctggccaccgcgttccgccaggtggtgttcgcgcaggtgaagatctcgctgctcaacaccgtgttcaccgccatcttcctgctgggcgtgctgccgctgttcggcgtgcatctgccgctgtccaagacgctggtactgatcaccttcatcgccggcctgctgccagtggtgggcaacatcatctccaacacgatcatcaccatcgtcgcgctgtcagtctcgttctacgtggccgtggccgcgctgctgtacctgatcgtgatccacaaactggaatacttcctcaacgcgcgcatcgtcggcggtgaaatccatgcccgcgcatgggagctgctgctggccatgctggtgatggaagcggcgttcggcctgcccgggctggtggcggcaccggtgttctacgcttacgtgaaacgcgaactggtcgaccagcgctggatctga

SEQ ID NO: 536099 - DNA, 1743 bp, Stenotrophomonas maltophilia
atggccggcaaggcatcgcccatcaggttgcggacctgggtctggatcctggctgggctgttcgtggtgtgcacgctgccgttgatggccatcgccctggtccagggcacgctgcgctacaccggcgccgaagacaacctggccagcctgcgccagctgcggcagaccttcgatctcgccaacctggcttcggccgagcgcggtccggccaacagcctgctgggggctgacccggccgacgccgccgaacaggcgcggctggccgcgcagctggcggccgcgcgcaagcgggtcgacaccgccatgctgcagctggagaccgtgttcaagaacgacccgggcgtgctggatgagcgtggcctgctggccgacgcgcaacgtcgcctgcagtcggcgcgggctgcggtggaccgggtggtggcgcaaccgcacgatgcgcgccgggtggaggcggtggagcgtgcgatcagtggcatgttcgccgtggttgatcgcctgcacctgctgacctcggcacagatcaacgtgctggtcagcgccgaccgtgaagcggcgattccggcgatgcagggccaggtgctgatcgatcttcgcgaacatggcggccgcctggcctcgaacgtgatggcgccggtcgcggtaccgggggcatggcgcgaggagcaggtacgcgctgcactgcagaccgagggccgcctgctggagctgtggcggttggcgggtagccatgagtcggtgttccgcagcgacccggaactgtcatggcactgggacatggcacgacggcagttcttcggcgaatcgctgccgatgatcgagcagttgatcgaggatggccgccgtggtgtaccaccgccgtggaccgctgccgaattcaccacgcgctacgtgcctaccctgcagtcgctggaagccctgcgtgatggctacctgagcgtgtccatcgcccgctacgaacgcacccgcaaccgcgaggccatgcgcctggctgtgctggtggcgaccgcgctgggcacgctggtggtgctgggcgtggccctgcgcatcgcccacctgcagatcctgcagccactgctgcaggcgcagaagcaggtgatccagctcgccacggatgcacctggcccggagcagcatgtcacccatccgctggccgagatgcagcgcctgttcgacgccatcgaagtactgcgtgagaaatcgcgcgagcgctcggcactgaccagcgagctgcgccagctcgccggcaccgacgagctgaccggactgttgaaccggcgcgcgctggatgaggtggtgcagcagaggcacgccggaggcgatgcaagcgccgtggtgatcctgctggatgtggatcgcttcaaggcgatcaacgatggccatggccatgaagctggcgacgaagtgctggtgcaggtggcgcagttgctgcagcgccacctgcgccgcagcgacagcatcgcccgctatggtggtgaggagttcctggtgctgctggccgacggtgatctggccggtggccgccagctggccgagtcattgcgattggccctgcagcagatggacatcacgctggccggcggcaccgtgctgcgggtgaccgccagcttcggcgtggccgagggcggcacggacgcgctgggctggcgcaccctgctgcgtgccgccgatgcggccatgtaccgggccaaggcgcaggggcgcgatcgggtacgggtggcggggggcggtcgcatcacgcgctga

SEQ ID NO: 536100 - DNA, 432 bp, Stenotrophomonas maltophilia
atgacccagctcacactgcccgaactggccaagaagatggccgacatcgatttcaccatgctgcagacccgcgccggcggagaaattgccggtcgtccgatgagcaacaacggtgacgtggactacgacggtgacagctggttcttcaccacagaagacaccgacatggtgcacgagattgaggctgaccccgccgttgcgctgggtttttccggcagcaggtcactgctgggcaagccgccgttgttcgtgcacgtgcagggaagggcggcgctggtgcgcgatcgcgctgtgatgcgcgagcactgggtgaaggatcttgagcgctggttcgagcagggcgtggatacaccggggctggtactgattcacgtgcgcgccagccgcatccactattgggatggcgaggaccagggcgaaatggcagtctga

SEQ ID NO: 536101 - DNA, 585 bp, Stenotrophomonas maltophilia
atgcgtcctgtgttcttctggctggctttggccctgctgcccaccctggcggtggcgcaacccgcgcgtacgcccaaggccaaggccccggcgcaggatcccttcagcgagctgttcgacaccgcctgcatgcagcacatcggtgctccggcgcggttgcagtcgctgatggaatccaatgggctgtcgccgctgcagcccgccgaagccgccacgctgttgcaggggcaatcgggcgtggcgtggatggtgcctctggccagtggccgctatgcggtgagctgggctgacgatggcacgtgtacggtctacgccgaaaaggccgacgcggcggtcgtgcagaagggattcgcccggttggtgcaggccgcacccaaaccgttgcaggtgcgatcgctgccagggcgtgggccactgtcggccgatcaggtggccatccagtacggctgggccacgccggggcagggcacgctgcaggtgcgcttccgcctggtcacgcggcaggcggccgatgcaggcgtgcaggcgatggcctcggcggccccgggcgaagcgatgctggagcagggcgcgcctgggccctga

SEQ ID NO: 536102 - DNA, 549 bp, Stenotrophomonas maltophilia
ttgaccgctcgtcccgcccgcgccagtcccgcgcgaggcctgttcaccctggcccaggccgccgtacaggccgtccgggcgatgtgctggctgggcatcctggccgcactgctggccgtgccgctggtcgcccatgaccgccgctggctactcgacagcgtccatgatgccggtgctgttgccgcgcacggcaacgacctgttcctgcacttctgcctcggcctgggcgcgatcgtcgcgctgctggtgctgtgcctgctgttcctgcgccatctgctgcggctgctgaagtcggcggcgcgcgagcggccgttcacccacgccaacgcgcagcgcctgcaacgcatggcgtggttgatgctggcgatggagctgctgtcgatcctgatcggcgcttacgcggcctggatggggcccgacttcagctggatggaggtgggcggcggcatgtcgatcaccggcctggtggcggtgctgatgctgttcgtgctggcgcgcgtgttcgccgtgggcgcagcgatgcgcgatgacctcgatggtgtcatctga

SEQ ID NO: 536103 - DNA, 225 bp, Stenotrophomonas maltophilia
atggcgattgtcatcaccctggaccgcatgctgcaggaacggggcatgaccctgtccgagctggccgggcgcatcgacatcaccctggccaacctgtcgatcctgaaaaccggcaaggcgcgtgccatccgcttttccaccctggatgcgatctgccgtgagctgcagtgcacgcccggtgatctgctcgggcatgacccgacgcaggcgcaggacgctgactga

SEQ ID NO: 536104 - DNA, 1542 bp, Stenotrophomonas maltophilia
atggaatggttggctgacccctcgatatggatgggccttgcaaccctggtcgtgctggagatcgttctcggcatcgacaacctggtgttcatcgcgatccttgccgacaagcttccgccgcaccagcgtgaccgcgcgcgggtgatcggcctggcgctggccctgctgatgcggctggtgctgctggccgcgctggcctggatcatgaagctgaccgagccgctgttgacgctgttcgaccacagtttctccggacgcgacctgatcctgctgggtggcggcctgttcctgctgttcaagggcaccatggaactgcatgagcggctggaaggccgccagcacgaggacaatggcaagaaggtctacgccagcttcgcgatggtcgtggcacagatcgtggtactcgacgcggtgttctcgctggactcggtgatcactgcggtcggcatggtcgacaacctgggcgtgatgtacgccgcggtgaccatcgcgatggcattgatgctggtggccagcaagccgctgacccgcttcgtcaacaagcatcccacggtggtggtgctgtgcctgggcttcctgctgatgatcggtttcagcctggtggccgagggcctgggctacaagatcccgaagggctacctgtacgcggccatcgctttctcgatcctggtcgaggcattcaaccagtgggtacgtttcaaccgcgagcgcaacgagcgccgccagccgttccgccaacgtactgcggatgcggtgctgcgcatgctgggcgcgcgcccgaccaatggccacgacgacgaaagtgctgacgaacacgtcgatgccgaagagcgcctgcagccggccgagcacgagatgatccgcagcgtgctggggctggcggatcgcccggtgtcgagcgtgatgactgtgcgcgccgacgtgcagtggatcgacctggcgcgtggacaggacgacgtggtggcacgcctggtggcatcgccgcacacccgcctgctggtcggcgacggcgacctggacagcctgcgaggcgtggtgcagagccgcgacctgctggccgacctgctgcagggcaagccgctgcagctggaaggcaacctgcgtgagccgcagtacgtgctgtccagcgccagtgcgctgcaggcgctggaactgatccgccagcacccggtgccgctggcggtggcggtggacgagtacggcagcgtggaaggcctggtgaccgccaacgacctgttggcggccattgccggtgacctggtcgacacccaggacgagcgctatggcgtggtcatgcagggggaaggccagtgggaggccgacggtgcgctgaccctggacgatctgcagcgcctggcgggcgtatcgctgccgcgcagtgccgactacatgaccatctccggcctggtgctggagcgcctgggacgcctgccggacatcggtgacgcagtggagatcgcggatgtacgcatcaccgtactggcgatggagaagcgtcgcattgcccgcctgcgcgtgcagcgcctcgacggaatggcctga

SEQ ID NO: 536105 - DNA, 1137 bp, Stenotrophomonas maltophilia
atggttgcagtgctgagtacgatcggtttgttgatgggcctgtatgtggcctggcgcctgttctggccactgcgcatgcccacctggatgaaagtcgtgctgtcactgctgttggtgggcgttgccgtgcagctgcgcatcgtcgccatgttctggggcacgatggcctcgcccgagattccgaaactggccatcgccacgctggccaccggctccacggcggtgttgctgctggcgttgctgatgctggcgctggacgtgagcctgcttgcttcccgcctgctgcgctggccacgcgcggtagccgcattgcgcacgcggagtctgcgaccggcggccggcttgctggccctgctggtcagtggttatggcatcagccagggcatggcggtgccccagcctcggcagatcgacgtggcgatcaaggatctgccggccgcgttcgacggctatcgcgtgctgcagctgaccgacatccacgccagccgcctgctgaccggtgactgggtgcgcagggtggtggaccagagcaacgcactgacgccggacctgatcgtgatcaccggcgacctgatcgacggcagtgtcgaggcccgccgtgacgacgcgcgtccactcgtggacctgcgggcgccggacggcgtcgtcgccatcaccggcaaccacgagtattacgcgcagtaccaggcgtggatgcaggcgtttcgcgcgctgcacatgcaggtgctggagaacagccacatgcaggtgcggcgtggcgatgcggcgctgaccatcgccggtgtcaccgacccggtggcggcacgctacggcctgccgctgccggatatggacgctgcattggctggcgccgatccctccgcgccggtgatcctgctcgatcatcgcccacgcaatgcgcgtgaggccgctgcgcgcggtgtgaagctgcagttgtccgggcatacccacggcggccagatcatcggcatggaccagctggtgaagcgggccaacggtggctatgtctccgggcgttacgaggtggacgggatgacactgtacgtgagcaatggcgctggcctgtgggccggattccccgcgcgcatcggcgtgccgtcggagatcaccctgatcaccctgcgccgcgccccgtga

SEQ ID NO: 536106 - DNA, 639 bp, Stenotrophomonas maltophilia
atggctgtttccaatacgtcctccctgcacggctggcgcctgttcgtggccatcgccgtggtcctgatcgccttcgcactggcggcgttcaccctgcagcccgacgtggtcgagggcagccgcgcggcgatccgggtgacggcacgcacatcgttcctgctgttcctggtcgccttcaccgcatcctcgttcgccagcctgctgcccggcccgttcacccgcttcctgctgcgcgagcgtcgcatcgtcggcctgtcgttcgcgttctcgcacctgctgcatgcggtggcgatcaccgccttcggcatcctcaaccccgcgttctggccggcgcgctcagccctggccaacctgccgggcacgatcggctatgtagccatcctcgccctggccatcacctcgcatcgtggcatcgcccgccgcatgggtcccactgcgtggcgtcgcctgcacgtgaccggcatgtggatcatcgccgcagtgttcacctattcgtacttcaagcgcgtgcccggcaacttctggtacgcggtgccctccgcgttgctcttcaccgccgtcgtggtgcgtgcgatcgccaagcgggcgcagtcgctgcggcgcaatgcgcatgcgcggccgccgctgcggagttcttga

SEQ ID NO: 536107 - DNA, 735 bp, Stenotrophomonas maltophilia
atggctgagccgctggccaccctgcagcagcgctgggccgaccatgtacgcgacccatcgatgcccgcgcctgagggcatcgatgcatggcggatggcggtctaccgccgcctctgcatcgacagcctggacagcctgctggcaggcagcctgccgcgcctgcaggcgcaactgggtgatgcctgctggcgcgacaccgtggcgcactactacgcgcggcatgcctgccataccccactgttcccgcagatcgccggcgaattcgccgcgtggctgggcgtgcaggcagacctcgcgctgccaggctgggtggcggaactggcgcattacgaaagcacgcagcaggcactgcacattgaagcgcggcacaccggccagcagccgttgcatgcgccacaggcaggcagcgtgctggcgctgtctccactggtgcgggtgctgggctaccagtggcctgtgcatgaggacgccggccagaacggtgcgcctaccacgatgccgacgttgctgctgctgcgacgcctgggtgacttcagcctgcaggtgcaggaactttcaccgctggcatatgcgctgctgtcggcgttcggcgatgacggcgcccgtgcggaagacgcgctgcaggtactggccgatctgcatggcgtggccgccgacgaactacgcacagcctgcattccgctactgggcgagctgtgcgcggccggcgtgctggttgtgccgaacgactgttga

SEQ ID NO: 536108 - DNA, 846 bp, Stenotrophomonas maltophilia
atgcgcttgcccctgccttccgccagtgccggtctcggcctgcgccgtggcctgatcgatgaactgctggcgatgccggccgatgccatcgacttcctcgaattgtcgccggacaactggatcggagttggcggtgcccacggcgccgcgctgcgccagctgagtgagcgccatcgcctgacctgccacggcctgtcgctgtcgctgggagggccggacccgctggaccgcaccctgctgacgcagacgcgcgcgttcctcgacctgcaccaggtgcagctgtacagcgaacacctgagctactgcgccgccggcggccatgtctatgacctgctgccgctgccgttcaccaccgaggccgtgcatcacgttgccggtcgcatccgccaggtgcaggacacactgggccggcgcatcgccgtggagaacatctcctactacgccgtgccaggcgcggacatgagcgagatcgacttcatcactgcagtgctggccgaggccgactgcgacctgctgctggacgtcaacaatgtcttcgtcaacgcctgcaacaacggctacgacgccttcgatttcctggcacgcgtgccgccgcatcgcgtcgcctcgctgcacgtggccggccacttcgacgaagacgatggcttcaagatcgacacccacggcgcgccggtgaagggcgtggtctgggcgctgctgggggaggcctatgcgcgtgtcggcgtacgccccaccctgctggagcgcgatttcaacttcccgcctttggccgagctgctggccgaggtggagcagatccgccacgcgcaggccgatgtgctgctgcccgaggtggcccatggctga

SEQ ID NO: 536109 - DNA, 477 bp, Stenotrophomonas maltophilia
atgtccgtctcgaccaagaacaccgctgcttcccgtctgccgcgcatcggcgccatcggcatcgccctggccggtggcctgctgctggccggccaggcggccgcgatccagccactggccatcggtgccgtggccatgagcgccgccgccgaaggcaagtgcggtgaaggcaagtgcggcgccaacaaggccgccactggcaagcctgccgccaaggccaaggtggccgaaggccagtgtggcgaaggcaagtgcggcgacgcttcgtttgcccgcaccgaccgtgaccacgacggccgggtctcgcgtgccgagttcaacgccgtggcggccaagcgcgccgctgaattcgaccgcatcgacaccgaccacgacggctacatcagcgaacaagaggcgcacgactacctgcgcagtgtctacaccgccaacggcaaaccgatgccgaagggcctgttctcccgcgtcaacgactga

SEQ ID NO: 536110 - DNA, 645 bp, Stenotrophomonas maltophilia
atgatcagctccgcttcttccgtgtatacaccccgcctggacgccgtcggccgctggctctctccattggcgctgcgcgccctgctggcctgggagttctttgaatcgggccgcgagaagctgggcggacagaactggttcgccgacctggaagggcgtttcccgttcccgttctccaccctgcctgcgtcactcaactggcagctggccacctggctggaactggtgggcgcggtgatgctgctgctgggcctggccacgcgctcggtggcctacatcttctgggtgctgacccttgttgccatcgctgccgtgcactggccggaccaatggaacagcctgggtgagctgtggcagggctacgcaatcaccgaccaaggctacggcaacttcaagctgccgctgctgttcctggccatgctgctgccgctgatcctcaacggcggcggtgcactcagcctggaccgcctgctggccggcccgcagcgcgccgcggcgggcaacgacggcctcggctggggcgtgagcctgatcgccctgctgctgccggtcgccgcgctgctgcccggtatcggtttcggtggcgcactactcggcggcgccctgctgctgggttaccgactgcgccgtcgccgcaacgcctga

SEQ ID NO: 536111 - DNA, 795 bp, Stenotrophomonas maltophilia
atgatccgcaccaccctgctcgccgctgccctcgcccttgccggcgtcgcgacgccggcattcgccgccgaggccgatgccggcgccgcgcccaccgtcatcctggtccacggtgccttcgccgatggctccagctggaacaaggtcatcaccaccctgcatgactggaaactgcctgcggtggccgtgcagaacccgctcacctcgctggccgacgatgtggccgccacccgtcgcgcgattgccgccgcaccgggcaaggtcgtgctggtcggccacagctggggcggcacggtcatcaccgaagcgggcaacgatcccaaggtgcaggcgctggtgtacgtggccgcattcgcaccggatgccgggcagtcatcggcacagcagggcgagggctatccggtcggcccgggcctgacgcgcctgcaggagaaggacggctacctgaccctgccagccgacgccatcgcccaggacttcgcaccggatgtgatgaagaagaccgctgcactgttgtacagcacgcaggtgccattgaaggccagcgcgctgggtgagtccgtcactgtggccgcatggcgcagcaagccgagctggtacgtgctcagccgtgacgaccgcatgttgtcgccgcaactgcaggcggccaccgcaaagcgcattggcgcgcagctgcaatcgatcggcagcagccatgtgtcgctgctctcgcacccggctcaggtggctgacagcattctggaagccgcaggcgtgaagccggccgaactgccgctggccgagcagggaggctga

SEQ ID NO: 536112 - DNA, 546 bp, Stenotrophomonas maltophilia
atgggcgcgctgcgtgtgtatgtactgccgttgctgctgggcctgctgggtggggcggcgctgctgatggccttgcccagcccggaggccggtgcgcatccggcgcaggccgctgctgctgccgggttcgatggcggcgggccctggcacaacagcccaccgctcgcgttgaatcaactgcgtgggcaggtggtgctggtcgagttctggacctacgcctgcagcaactgcctcaccgtggcaccgcatgtgcaccagtggcatgcacgttacgcgcggcagggcctgcaggtgatcggcgtgcatactccggagttcgcctacgaaggcctgcccggcaatgtgcgcaaggccatcgcgcggctggatatcacctggccggtggtgcaggacaaccagtaccggatctggaacgcctggggcaaccgcttctggccggcgctttacctggtcgaccggcagggcagggtggtctaccgccactacggtgaaggcgattacgcacgtaccgaaagcgagatccagcgcctgctggccagcccctga

SEQ ID NO: 536113 - DNA, 741 bp, Stenotrophomonas maltophilia
atgaaccacgtaccgcacatccttgtcgtcgacgatgacagcgagatccgccagatgctggccgactacctgcagcgcaacggcctgcgcgtcagccaggccgatggcggccgtgcgatgcgcgcgctgatggacacccacgcggtggacctggtggtgctggacgtgatgatgcccggcgaggacgggttgagcctgtgccgcaacctgcgtgccggcaagcatcgcgcggtgccggtggtgctgctgaccgcccgcgacgacgaaaccgaccgcatcatcggccttgaaatgggcgccgatgactacgtgaccaagccgttctcctcacgcgaactgctggcgcgcatcaatgcggtgatccggcgcacgcagatgctgccgccgaacctgcaggtgagtgaagccggccgccagttggccttcggcgactggcgcctggatactactgcccgccatctgctggatgcgcaggacaccgcctatccgctcagcggtgcggaattccgcctgctgcgcgtgtttctcgaccacgccaatcgtgtgctcagccgcgaccagctgctcagccttacccagggccgtgatgcagaactgttcgatcgttccatcgatctcctggtcagccgcgtgcgccagcgcctgggcgatgacgcgcgtgagcccacctacatcaagaccgtgcgcagcgaaggctacgtgttcagcgtgccggtgcagctgctggggccggaggaatga

SEQ ID NO: 536114 - DNA, 1314 bp, Stenotrophomonas maltophilia
atgaacgcccgcgcgcgccgcctgccgtggccgcgcacgctgtcggcgcgcctgctgctggtgctgctgggcgggttgatcctggcccatgcgctgtccttcggcctgttgttctacgaacgctaccagtccacccgcagcatgatgctgcgcaacctggacgaggatgtagcagtgagcgtggccctgctggaacatctgccggccgaccagcgccaggcctgggtgccgcggttggagcggcgtacgtaccgttacctgttgcgcccggcacaggccggcccggcgttggaaaccgatcgtgcgcgccaggtcaccgccatcatcgatgacagtctggaacaccgctatccgctgcaggcgcggcaggtggcacggctgccggaacgttttgaagtggagctgcgcctgcacgacggttcaccgttgaccatcgaagtcacaccgtcgggcctgccgctggcgcgctggctgccggccgtgctgctggtgcagctggccctgctgctggtatgcgcctggctggcggtgcggctggcattgcgcccgctgcggcagctctcgcacgccgtcgagcaactgcagcctggcaaggacgcaccgatgctgcccgaagacggccccgccgaagtgggcacggccgcagccgcgctcaatgcactgcaggcgcggatccgtggccatgtcagcgagcggctgcagattctggcggccatctcgcacgatctgcagacgccgatcacgcgcatgaagctgcgcgtggaaaccctgcccgaagatgccacccagcagcgcctgctggatgacctggaccacctggggcaactggtgcgcgaaggcgtggcctacgcgcgcagcagccacgtggccagtggcgcgccagtggcgatggatcttggcgcgttcctggccagcgtggtgggcgactatgaagacatgggcaaggcggtccgtggtggcgcacccacaggcctgaccgtgcagacctggccgcagccgctgcggcgggtggtcggcaacctggtcgacaacgcgttgcgctacgccggtagtgccgagatcgaggcggggcgcgatgcagcaggccggccgtggatcagcgtgtccgaccgcggccccggcatcccggaggaccagctgcaggcggtgctggcaccgttccatcggctggaaagctcacgcaaccgcgataccggcggcaccgggctgggtctggccatcgccgtgcagctggcgcagtcgctgggcggctcgctgcggctgcacaaccgtgagggcggtggcctgcgggccgaattgcagctgccggagtaa

SEQ ID NO: 536115 - DNA, 1014 bp, Stenotrophomonas maltophilia
atgcagggaacgcagcattcaatccagcgtgcgcgccacgtcgcgctgctggtcggtctactcgtgctggccgcatgtcagcgcacaccggatgcgctgaccgggacacccgcagcgggcacatcgcttgccgccccggccacggcaacagacctctctccgctcctcgatgccttgccgacctgcgcgctggacggctggtacatcgatcatcagactgggcgtccggcccatccctggctggccgagaacgcgtcgacaccctgcaaggtggatgaggaaaacgagatcgccacgttctgcgtgcgggggcaatggaaaggattgccggtggaggaggtgatccttccgacgatgacgttcgtttcattccgtggtgcgaagatcggcctgccgctggagagggcacgctcgattgtccgccatcagttcgggcaggatttcccgggcggtgcggcctacgaggcgggacgcgagccgaaattgatggccgatcccgaggatgcacagcgctcgtggctgctgtgcagcacgccggaaccgggagacgacctggacaaccaggcaggcgtgagctattccggcatgaacctgccctacgaccacgacggatgcagctatcgctacagcccgatcgatttctgcgatgcgcagcacgtggcgcgcatcgaggaagccctcaggaacgaaaagcccaacttcaaccagcactacctgctggtgcaggccgatgatcgccccgggttcttccagcgctcggtggtgctggtcgacacgcgcaccggacgcgccacgccattgccgatcgatgccttcaccgggccagcggagaagggcggagacgccatccgctacggaaccctggaaacgggtgtggaccagcagcagttctgcctggatggcgcgctgctggtctaccgcgtgttcgaggaagggcgattctgcttcggctttgacggtgagcgcttcaccggccatgaaacccagtacatgcaggcgacggatagtcgatga

SEQ ID NO: 536116 - DNA, 1260 bp, Stenotrophomonas maltophilia
atgacggtagcgcggcagcgctcgatgtgggtggccggcctgtccacggtggtggagtggtacgacttcaccctgtacctgtacttcgccacggtgctgtcgcgggtgttcttcggcggtggcgaacaggcgctgctggtgacactggccggctttgcggtgtcctacctgatgcgcccgctgggcgcgctgtgtttcggccaccttggcgatcgactgggccggcgctggatgctgctggcctccatggcattgatggcggccgcgatgctggctaccgcgctgctgccgacagcggccacggcaggtactacagcaggcgtgctgctgctggtactgcgctgcgtgatggcgttttcggtgggcggtgagtacaccggcgtggtggcctacctgctggaaagcgcacccgtgcggcgacgaggcctggtgacctcgctggcgtcggcagccagcgaagtgggggcgctgctggcggtggcgatttccgcgttcacggtcgcgctgctgcccatcgcgcagctggacagctggggctggcgcattccgttcttcttcggtgccgcgctggcactggtgatcctggttgcgcggtcgggcatgcgtgaatcgcctgagttcgagcgccagcagcgcgagggcagcattcccgccacgccgctgcggcatgtgctccgcaaccatcccgcagcagtggcgcgcaccttcgcgatctcggcgctgggctcgatcacctactacgtgggcatcacctacgtgccgtcgttcctgcatgcgcagggtcatgacgaagccgatgcgctgtggctgtcgacgattgcggcagtggcggtgatcgcgatcacgccactgtgcggcgcattgtccgaccgcgtcggacgacggccggtgctgctgggcctgaccgtgctggcagcgctgctgccgctgtccctgttcgcgtggatggcgcaggcgacggcgctgggcatcgcgctggccgccgtgctgctggcctgcgtggccggtggtgtcagtgcggtcgcggccccggccacggccgagcagttcccgggcgaaggccgggtcagcgggttggcactgggtgtgaccatggccaccgcggtgttcggcggcgcgacgccttggctggcgcaatggtgggtggaacgcagcggctgggcggcggcaccgggcgcgatgatcgcgctggtggcagtgctggtgcttccggtgctgtggaccctgcccgagaccgtcccaggcagggccagacgctag

SEQ ID NO: 536117 - DNA, 948 bp, Stenotrophomonas maltophilia
atgctgaaagtcattttcgataccgacccgggcgtcgacgacgccctggccctgctgtacctgcacaagcacgcccagatcgacctgatcggcgtcaccaccaccttcggcaatgcctcggtggagtcgaccacgcacaatgcgctgtacctgaagcaggcctggggctttgccgccccggtcgcgcgcggtgccggtggcccgctgcagccggaagccaccccggaagcctggccggtgcacatccatggccacaacggcctgggcaaccacccggtgccggccgaactggacgtgaccgccgacgcgcgccccgcccaccagctgatcatcgacctggtccgcgcccatccgggcgaggtgaccctggtcgcggtcggccgcatgaccaacctggccctggccctgcagcaggcgccggacatcgccagcctggtgcgcggcgtggtgctgatgggcggcgccttccacgtcaacggcaacatcaccccggccgccgaggccaacatctggggtgacgccgaagcggccgacgtggtgttcaccaccgattggccggtcaccgcgatcggcctggacgtgaccacccgcgtggaaatggaccgtgatggcctggataagctggccgcactcggcggcgccgacgccgagctggtccgtgcactgtcgcaggactacgtggacttctacctgcaggccggccacaagggcatggtcgtgcacgactgctgcgcctgcattgccctgacccgtccggagctgttccagttcgagcgtgccagcgtgcgcgtggccaccgacggcgttgcccgtggcatgaccattccgaagccggaaggcatgggcttcggccccagcgtgtgggatggccacgtgctgcagtccgtcgccatcggcgtggatgcggccgcggtactggccgacatcgagcagaccctgaaggtctga

SEQ ID NO: 536118 - DNA, 333 bp, Stenotrophomonas maltophilia
atgctgatcgttgcccttctgctggtcctgctggtgctgggcctgaacgtggtggctaccgtggtgatcgtcaagcgtgatggcctgtcggcgggcggccggacggtgcagttgctgctgatctggctgctgccgctggtgggcgcaatcctgtgcatggcggtggccacggccgatggctcgggaagccggggggacaacggtctcggcggtgcctacgatcattcgtgcgggcattccggcgacaaccacagccagcacaaccacagcagctccgactgtggaagcgacggcggcagcagtgacggtggtggcagcagcagcagcgactga

SEQ ID NO: 536119 - DNA, 720 bp, Stenotrophomonas maltophilia
atggctattgcccctgccccgcggtcaccgaagaagcgcgcacctctgtacgaagaggtggccgaacacgtgcgcgaacgcatctatgactatcgcctgccgccgggcgagtggatcgacgagcccgcgctgtgcgaagaactgggcatcagccgcacaccgctgcgcgaggccctgaagctgctggccgctgaaggcctggtgcagatcgatgcgggtcgtggcagcagggtcacgcgactgacgctggaagacctcaaccagctgtttccggtgatggcgatgctggaaggccgctgcgcgcacgaggcggtgaagcacatcgacgatgccggtgtgcagcaactggaagacctgcatgcagcaatggagacggcagcggccgaaggcaacatcgccgagtactaccgcaacaactacctcattcacgagaccgtgcaacattacgccggcaacccgtggctgatccggatcacccacgacctgcaccgcatcctgaagatgcaccgtggccgccagttgctgaccccgggccgtaccgcgcagtcgctggcagagcaccgcgaactgatggagtgcttccgcaagcgtgatgccgctgccgccgaacgcaccatggagcgccacctgctcagccagggccaggcgctggccgcctatgtcgcggcaggcgggttgttgaatgtgccggcgccgctgccgaccgaaggcggcggctga

SEQ ID NO: 536120 - DNA, 1368 bp, Stenotrophomonas maltophilia
atgagtccacaaatcgcaacgatcatcggcctggtgatcatgttcatcatcgccaccgctctaccgatcaacatgggtgccgtcgccttcgcgctggccttcatcatcggtgggctgtgggtcgacatgggcggcaaggaggtcctggccggctttcccggcgatctgttcctgaccctggttggcatcacctacctgttcgccatcgcgcagaagaacggtaccatcgacctgctggtgcactgggcggtgaaagcggtacgcggccatatcgtggccattccgtgggtgatgttcgtcatcaccgcggtcctcaccgccttcggcgcactcggccccgccgcggtggcgatcatcgggccggtcgcgctgcgctttgccaagcaatacaatatcaacccgctgatgatgggcctgctggtcatccacggtgcgcaggccggcggcttctcgcccatcagcgtgtacggcagcatcaccaacggcgtggtgcagaaggccgggctggaagtgaccgagatggcggtgttcctgaccagcctgggcttcaacttcatgatggcgacgatctgcttcttcgccttcggtggtatcgccctgctgcgtcgcggctcgatcaccgcagcaggaacgatcggcactgccgaactggcgatggccggtggcccgcaggcgtcgtcgcgccagttcgcgatcgaaggccatggcgcgctggtcgcagcaggcggcggcacgctcagcaatgatccggcggcactggacgcggtgggcctgacccgcgagcggttgttcaccctgatcggcctgctcggcctgggcgtggccgcgttgatctacaacctcaacgtcggcctggtctcgatcaccgtggcggtggcgctggcgctgttgtcgccacaaagccagaagggtgcggtcgatggcatcagctggtccaccgtgctgctgatctgcggcgtggtgacctacatcggcgtgctggaacatgccggcgcggtggacttcatcggcaacggcgtgtccgacatcggcattccgctgctgggcgcgctgctggtctgctacgtcggcggcatcgtctccgcattcgcttcctcggcggcggtactgggcgccacgattccgctggcggtgccgttcctcctgcagggccacctcagcgccgccggcgtgatctgcgcgctggcggtgtcgtccaccatcgtcgatgtcagcccgttctcgaccaatggcgcactggtggtggcctcggccgcgaaggaagagcgcgagaccctgttccgccgcttcctggtgtacagcggtctggtggtcgcgctggggccgctgctggcctggctggtgttcgtggtgcccggctggatgtaa

SEQ ID NO: 536121 - DNA, 921 bp, Stenotrophomonas maltophilia
atgagccttgccctgctctgccccgggcaaggcgcgcagcacgccgcgatgttcgagcacgtgcgcgatctgcctgccgcgcgcaacgtactggaggctgccagcgcagtgcttggacgcgatgtgttcgcggcggccgctgacgaatcgcgcttcggcaatgcactcgcgcagcccctgctgtgtgcagccagcctcgcgcactggcagggacttcgcgaagcggtgcaagcaccggtgctggtggccggctacagcatcggtgaactggccgcgcatgcgatcgccggcagcgttgatgccgccacctgcctggctctcgccgctcggcgcgcgtggttgatggacagcgccagccccgccgatgcaggtctgcaggcggtgcttggcctggaacgccacgtactgcagccgctgtgcgatctgcacggtgcgtacgtggccatcgccaacgggcacgaccatttcatcgtgggcggcacgcacgcctcgctgcagggcctggccgatgcagcgcgtgcacgcggtgcaggcatccggccgctgccggtgcacgttccggcgcacacaccgctgctggcagcggcggtcgcaccgttcgctgcggccctcgatgcctccgcgctacaggccccgcgcctgccgctgctggccggcatcgatgcgcgtccggtgcgggatcgcacaacggcggtccacacgctgtcgttgcagctggcgcagaccatcgagtgggcgcaggtgatgcgccaggcctacgagcgcggtgcgcgggtgttcctgcagctgggcccgggcaatgccttggcccgcatggtcgcgtccgattatccgtgctgcgaggtgcgcgcggtggaggaattccagagcctcgacggcgcggcgggctgggtccgcaacgcgctggagcggctgcagtaa

SEQ ID NO: 536122 - DNA, 858 bp, Stenotrophomonas maltophilia
atgaacgccgtcgtgcaacctgcactcaggccagtcgctgccgtgaacagcgcgcgactggggcgcctcgccatcgccagcctgcacgcggaactggcactggcgcccaagcccggactggtcacacccttcgacaccggcagccatcgcgacatggacgccggcacgttcctgcgaagtctgttcgcgctgcgccactacttcatcgccgtggccgacgccggtgccagcgcggcgccgttccagacactgcgggcgcatggcatcgccgctgagatatcgatgctgcacgccaccgcgggcatcaacacccatcgcggtgcgatcttcagccttgggctgctggtggccgcgtccgctgcctgccagggccgcgcgggccatgccatcgcagccgaacaggtctgccaggaagtgcgccgttgggctgccgagctcgccggcgcacctctggatgcgaacagccctggccagcgcgcgcgcgcgcggcacggcgtgcaaggtgtgcgcgaacaagcggccaccggctacccgctgctgcgcgatgtggcactgcctaccctgcgccacgcactggccagcggcctgccacgcgaggccgcgatgtgccagaccctgatgcagctgatcgcgtgcgtggatgacctcaacctgctgcaccgtggcggcgccgacggcctgcgctgggcccagcggcaggcgcgccgttttctgcagggcggcggtaccttcgtacccggctggcaggcacgcctgcacggcatcggtgagcgcttcgtcgcacgccgcctgagccctggtggcagtgctgatctgcttgcctgcagctggttcctgctgcagcaggagggcgtatga

SEQ ID NO: 536123 - DNA, 642 bp, Stenotrophomonas maltophilia
atgcctgagcggctgccccgccatacgctagtctggctgtcagcgcacgccggctggcaggcggacattgccgcgcatgagtcgcgcttggccgattggtttgcgcagggccggccggccatcgtcgcgcgacgtgccgccgatgatgcggacccccgcctgcgtctgggcgtgccgctaccgcccgccgagggcaaactgcgcctggccctgcgcgtacgagcacacgatgtgctgcgcaccgcgccgccgccgacacttcagacggtgctggaaggcgacgttccacaggactggcagcggccccttgaagtgctgcagaacatcgctggggcgcgcgtaatcggtgccttcgcgtggcagcacctcactggcctgcgctatgtgcacgcgcgctcggacgtcgatctgctgtggccgatcgacaccaccgcgcaggccgatgccctggctgcacggctacaggcatgggaagccgaacacgaccggcgggtcgatggcgagctgtgcctgggcggcgacgccgccgtgaactggcgcgagtacgccggacgcagccgcgaggtactggtcaagcgcctcgatggtgccgctctggaactgcgcgaggcgttgttcgcttccaccggggtgagcgcatga

SEQ ID NO: 536124 - DNA, 711 bp, Stenotrophomonas maltophilia
atgagcatgcaattgcagagcctgctcgatgccctgttcccgcaggggcatgccattgcggtgaacgattcggtgctgaccggcagcgctgccaccgaggatggcgaagtgaccgtgatcggtaccgccgacaaactcgaagtcggcgtggaccacgcactggcactggccgggacggtgctggccagcacccgcgcacatccccaacggccgatcgtgatgctggtggataccgctggccagcgcctggcgcggcgcgacgaactgcttggcatcaatggttactttgcgcatctcgcgcagacgctcgatctggcacgccgccgtggtgcgcaactgatcacgctggtctacggcgaatcggtcagtggcggcttcctctcattcggcctgatggccgactacatccacgccctgcccgatgcacaggtgcgggtgatggacctgcgcgcgatggcacgggtgaccaagcagccgctggagaaactgcagtcgctcagccagacctcaccggtgttcgcgccgggcgtggaaaactacgtagcgatgggtgcggtggactcgatctggaacggcaacctggccgcccacctgctgcaggcactgcgcacgcccgccgatggcgaccgccgcgccgtgcgcggagccgaacggggcgggcgcatgctggccgcacgcgtggctgctgccgtgagccagggcgatgcctga

SEQ ID NO: 536125 - DNA, 909 bp, Stenotrophomonas maltophilia
atgaaccggacgcagcgccacagttactacgaagccgatgcgcgcgagcgcatcgccgggttgatcgacgcgggttcgttcagcgaattcctcggcccggcgcggcggatgatgagcccccacctggcgcagctcgatcagcctgcggccttcgacgatggcatcgtcgtcggcgaagccacgctgcagggaagacgcgtgctgctggccgcacagcagggtgaattcatgggcggcggcgtgggcgaggtgcatggcgccaagttgaccgggctgctgcgccgtgcggcgacaacccgccctgacggtgtgctgctcctgctcgacaccggcggcgtgcgcctgcacgaagccaatgcagggctcatcgccatttccgagatcatgcgcgccaccctggacgcgcgtgcagcgggcgtgccggtgatcgcgctgatcggcagcggtaacggcgcgttcggcggcatgggcatcgtcgcccgctgctgcagcacggtcatcatgtccgaggaaggccggctgtcgctgtccggcccggaagtgatcgagacggtacgcggcgtggaagagttcgattcgcgcgaccgtgcgctggtctggcgcgtgaccggcggcaagcaccgctacctgatcgaccaggcgcaggtgctggtacccgacgccatcgaagccttcgcacaggccgcaagcgatgcgctgcagcccgatgccgccagcaccgataccggtgcggcgttggccgcgctgcaggaacgccatgcggcattgaaagcccgcgtgcaggcctggagcgattgccgcgatggcctggagatctgggcgcggctgggcattccccaccccgaacgcctgccactgctcgacaccgatgaattcctcatcgccaccgccgaccggagcctgccatga

SEQ ID NO: 536126 - DNA, 321 bp, Stenotrophomonas maltophilia
atggaaaccctcgactatcgattcgaaggacacactgcggtgcagtttccgcgcgatgcggtgctggtcggcgtactggcctcgggcaacctggaaatcctgctggagccggcggcgcaggacggcgcgatgacggtacgcatcatcaccgccgcacagggcttcgggaacgtgtggcaagcggtgatcagcgacttcgcagagcgtcatccgctgcgcgatgtacgcatctcgatcaacgatgcgggtgcaactccggcggtggtcagcctgcgactggaccaggccgtggaaaccctgctcagtggagatgcacgatga

SEQ ID NO: 536127 - DNA, 1644 bp, Stenotrophomonas maltophilia
atgaacccgagctgggatacgttggaacgcagccgccaggcccgcctggaacgtgccgcgccgtgggcccggggacgcgaggtcgccgccaccgatgtgggcgagctgctgcacgcactgctggagccaggcgacaaggtctgcctggagggcaacaaccagaagcaggccgacttcctcgcccaggccctggccgacctcgacccggcacgggtgcatgacctgcacatggtgcagtcggtgttgtccctgccctcgcacctggatgtattcgagcgtggtatcgcttcgaaactggacttctcgttctccggcccgcagtcggtgcggctggccaacctggtggctgaagggcgcatccagatcggtgccatccacacctacctggaactgttcggccgctacttcatcgacctgaccccgcgcgtggccctggtcgccgcgcaggccgcagaccgccacggcaacctctacaccggcccgaacaccgaagacacgccggtgatcgtcgaagccaccgccttcggtggcggcatcgtcattgcccaggtcaacgaaatcgtcgacaccctcccccgcgtcgacattcccgctgactgggtcaacttcgtggtacaggcaccgaagccgaaccatatcgaaccgctgttcacccgcgacccggcgcagatctccgagatccaggtgttgatggcgatgatggccatcaagggcatctatgccgagtacggcgtcaaccgcctcaaccatggcatcggcttcgatacggcggccatcgaactgctgctccccacctacgccgaatcgctcggcctgaaggaaaagatctgccagcactgggcactgaacccgcatccggcgctgattccggccattgaatcgggcttcgtgaagtcggtgcactcattcggttcggaactgggcatggagaaatacatcgcggcgcgaggcgatgtgttcttcaccggcgccgatggctcgatgcgttccaaccgcgcgttctcgcagaccgccggcctgtatgcctgcgacatgttcatcggttccacactgcagatagacctgcagggcaacagctccaccgccacccgcgatcgcatcgccggcttcggcggtgcaccgaacatgggctcggatgcacgtggtcgccgccatgccagcgacgcctggatcaaggccggccagcaggccgcgcgcccgggcgagatgccgcgcgggcgcaagctggtggtgcagatggtggagaccttccgcgagcacatggcgccggccttcgttgaacgtcttgatgcctgggaactggccgagcgcgcggacatgccgctgccgccggtgatgatctatggtgacgacgtcagccacgtgctgaccgaggaaggcatcgccaacctgctgctgtgccgcacgccggaagaacgcgagcaggcgatccgcggcgtggccggctacaccgccgtcggcctcggccgcgaccgcgcgatggtggaaaacctgcgcgaccgcggcgtgatccgccgtcccgatgacctgggcatctctgtgcgcgatgccagccgtgacctgctggcggcgcgttcggtgaaggacctggtgcgctggtccggcggactgtacgacccgcccaagcgcttccgcaactggtaa

SEQ ID NO: 536128 - DNA, 2193 bp, Stenotrophomonas maltophilia
atgtccctgaccctgcgtaaccgcctgccccgccgcgcgctgctgccggctgccctgctttcgtcgttgtccctgctggccgcgcccagcgcgttcgccgccgccgatggtgctgccgatgccaagaccctggaccgtgtcagcgtgcgtgccgagcagtccgctccgccatccagcaccacccgcctgccgatcaccctgcaggaaaccccgcagtcggccactgcaatcagcctcaagcgcctgcaggacgaatcgctgttcagcatcaacgatgtgatgcgcaacgtgaccggcgtcagcgtgtccttctatgacacgcagcgcccgctgtactacgcgcgcggcttcgccatcaccgacttccaggtagacggcattcccacctacagcggctccaccaaccaggaatacgacaccgccttctacgaccgcatcgaagtgatccgcggcgccaacggcctgctcagtggcgccggcgtgccgtcggccacggtcaacctgctgcgcaagcgcccgggcaaggagttcgatgcctcgttcgcggtcagcgccggcagctgggactatcggcgcatggaggcggacgtgaccgcgccgctgaccgatgacggccgtttccgcagccgcgtggtcgccgcctataccgatcggggcctgtattacgaccgttacgatgagaacaagatggccggcatggcggtgctggaaggcgacgtcaccgacagcaccaccatcaccctcggttaccagagccaggacaacaacccgaccggctcgacctggggcaccgtgccgttcttcgacaaccagggcaacttcgcccacctgccgcgttcgaccaacctgtcgccgaagtggagctactggaagcgcgagagcaacaccgcgttcgccaaccttgaacagcacttcggtgacaactggctgttgaagatcaacaccgcctacacccgcggcaacgtgcagaacgtgcgcctgtacggcaccggcaacccggacccggtgaccggctcgggcatctacctgcgtgccgccgccggtgattccaaggacacccgccgcaatgtcgatgcctacctgtccggcagcttcgacctgttcggccgcgagcacgacctcaccgttggcgcacagtggtcggacctggaaggcaccaccaacaccctcgcactgaactacccgaccgactgggcgcgctgtggcagcgagcgctgctactacatccccaatgtgtacagctggaacggcgacatctccgaagtgacctaccgtcgcaccggcgcacgccgcgtggccaagaccacgcagagtggcgtctacctggccacccgcctgcgcctggccgatccgctgtcgctgattgccggtgcgcgcctgagccgctgggaaaccctcagccgctcgtacaacgccgcaggcgcctacaccggcaccagcggtgcgtacaaggtgagcgatgaagtcaccccctacgtgggcctggtctacgacatcaccccgaacgtgtcggcctatgccagctacaccgagatcttcaacccgcagaacttcaaggaccgcaacgagaacctgctggcaccggtgcagggctcgaacctggaagcaggcatcaagacccagtggctggatggccgcctgaccgccaatgccgccgtgttcgaggccaagcaggacaactacgcggtgcgcgacatgggcgtgccggagggttcgctcagcgatggcacctccgcctacgtcggcgtcaacggcaccaaggcgcgcggctgggagatggacgtcaacggcgagatcctgccgggctggacggtcaatgccggctacacccacgtcaaggtcacccgcgcggctaccgacctgctgtacgccaatccgccgaaggatctgttgcagctcaacacccagctgcagctgcgcggcgcgctggaacgcctgagcgttggcggcggcctgcagtggcagagcaaggtgcagggctacaacatcgcctacccgctgggcggcacggtcacggtgaaccagccggcctacatgctggtgcagttcaatgccaactaccgcatcagcgacagctggaccgcaacgctgagcgtgcgcaacgcactggacaagacttactgggcgaatctggactacaacaactacggcgaaccgcgcttcgtgtcggccagcctgcgctggaagttctga

SEQ ID NO: 536129 - DNA, 1695 bp, Stenotrophomonas maltophilia
atgaagaaatttggcaaggccctgctcgccctgctcgtgctgctgttgctggccgccgcgctgttcctgtactggccgctgacccagcgctcggtgcccgccgccagcaacgacaagcccgtcgacgttgtgctggtcggcgccggcatcatgagcatcaccctggccacctacctgcaggaactgcagccggactggaacatccaggtctacgaacgcctcgacggcgtcgccggtgaaagctccgatggctggaacaacgccggcaccggccactcggcgttcgccgaactgaactacaccccggaactgcccgacggcagcatcgagaccaagcgcgcggtcggcatcgccgaatcgttcgaggtctcgcgccagttctggtcgcaccaggtcaagcaaggccggctgagccagcccagcgacttcatcaacccgaccccgcacatgagcttcgtctggggcgatgacaacatcgcctacctgcacaagcgccagcaggccctggtgaagaatccgctgttctacggcatgcagtactcggaagatccggcgcagatcaagcagtgggccccgctgctgatggaaggccgtgacccgaagcagaaggttgccgcgacctggatgccgctcggcaccgacgtcaacttcggtgtgatcacccgccagctgaccaccggcctgcagcgcagcccgaacttcaacctgcacctcaaccacgaagtgagcgcgctgcggcagaacgccgacaagagctggaacgtgacggtgaaggacctcaaggccggcaccgaatccaccacccacgcccgcttcgtgttcatcggtgccggtggcgccgcgctcaagctgctgcagatgtccggcattccggaatcgaaggactacgccggcttcccggtcggtggccagttcctcgccttccagggccaggacgtgacctcgcgccatggcgtgaaggcctacggcatggccgagaccggttcgccgccgatgtcggtgccgcacctggatgcgcgcaagctggacggcaagccggtggtgctgttcgggccgttcgcgctgtacagcaccaagttcctcaagcacggctcgtggtgggacctgtattcctcggtcacccacaacaacgtcggcccgatgctggaagtgggcaaggacaacctggacctggtgcagtacctgatgggccaggcacgcctgaacgatgccgaccgccaggccgagctggtcaagtacttccccaacgccaagccgggtgactggaagctggtcaccgccggccagcgcgtgcagatcatcaagcgtgatccgctgaagggcccggtgctgcagttcggtaccgagatcgtgaccgacaaggaccacaccctcgcggccctgctcggcgcctcgccgggtgcgtcgacctcgccgccgatcatgctggacctgatggccaaggccttcccggaccagatgaaggccggctgggaaacccgcctgcgcgaaatcgtgccgtcgtacgggcgcaagctcaacgacagtgccgcgctggtcaacgagatccgcacgctgaccagccagaccctgcaccttccctacctggaagtgccggtggatgccaacgcggcagcacctgcaccggccgcaattccggctccggctccggtcaaggaaaagcgcaacgccaacgaggaactgcaggcgctgtaa

SEQ ID NO: 536130 - DNA, 447 bp, Stenotrophomonas maltophilia
atgcctgtattcgtccgcgatgcgcgccccgaagatgccgccgcctgcatcgacctgcgcgggcgcacccgcgagaacgccttcagtgccgcccaactggcggaactgggcatcaccgaggacagctgggccgccggcatcgcccaaggcgattcgatcggccgcgtcgcctgggagggcgagcgcatggccggttactgcttcgccgaccgcgacagcggcgaggtgctggtgctggccctgctgccggactacgaaggccgcggcatcggccgccaactgctgcaggacgtggtgagcctgacccgcgatgccggccaccggcggctgttcctggcctgctcggccgacccgcgatcgcgctcgcacggcttctaccggcgcctgggctggcgcccgaccggcgagatcgacgacgccggagacgagattctggagctggtctga

SEQ ID NO: 536131 - DNA, 435 bp, Stenotrophomonas maltophilia
atggaacttcctgacgaaatctatgagcgggtcactgacctctcagagcagggaaacgtcctcatggatgccgatgaccatgctggcgcgactcggtgttggctgcaggctttagaagcgttgccagctcctgccaaagattgggaggcctacacgtggctctgtgcttcacttggagacgcgagctttctttccggtgacgtagtgaccgccctgaagtacttcatggatgcattgaatgctccggacgggcatgccaatcccttcatcctgtatcgcgttggccaatgcaacgaacttctggggcagcgggatcgggcccttgagtacctgctcagggcgtatgcattggatggcgaggacatattcgacgccgacgatgaaggtgggaggtaccttgccttgctgcgacaggagggcctcactgcgccctaa

SEQ ID NO: 536132 - DNA, 906 bp, Stenotrophomonas maltophilia
atgcgtatcgaccatgcccagctgcgcgccctggccgcggtgatccgcgaaggcagcttcgaccgcgccgcacagtcgttgaatgtcacgccctcggccatctcgcagcgggtcaaggcgctggaggaccgggtcggccgcctgctggtcaagcgcggcactccggccaccgccaccgccgagggccaggtgctggtgcagctggccgagcagaccgccctgctcgaacacgatgccctgcaccgtatgggcctggccgacgaggacctgccccaggcaagcatcccggtggcggtgaaccacgacagcctggagacctggttcccgcaggccgcctcgcagttcgcgcagagcaccggcaccacgctggacctgcgcgtggaagaccaggaccacaccgtcgaactgctgcgccagggcacggtgctgggcgcggtgaccaccctggatgagccggtgcagggctgccagatccacgcgctgggcagcatccgctacgcggcgacctgtacccccgagttccgcgagcgccatttcgccaagggcgtaaccgcgcaggcgctggcgcaggccccggtgctggtattcaaccgcaaggacgaaatgcagtcgcgcttcgcccggcgcatggcgggcgacgacctgcccagcaccgcgccgacctggtggattccgtccacccgcgccttcgtgcaggccaatctgggcggcatgggctggaccatgaaccccctgcccttggtcaagcggcatctggacgccgggcgactggtctacgtgcgccagcgcgcgtgggaagacgtgccgctgtactggcagcattggaagggcgacgtgcagaccatggccctgctgacccgcgcggtgctggatgcctcctccgcgctggtccggcgcaagcgctga

SEQ ID NO: 536133 - DNA, 708 bp, Stenotrophomonas maltophilia
atggcgcccgttccggtgctgtccgccttcgcgaggcaccgttcccccaagcaagtaaaggcagtgaatcccatgttctcggtcatctccgccagcaccggcctcggtgcctggttctctggtgcagctaccggcatcggcctgttcgccgtggtcggggcccagagcgccttcattctgcgtcagggcatcctgcgcaagcacatcgtgccggtggttgccacctgtgcggccatcgatgcgatcttcatcttcgccagcgtggccggcctgcgcacgctcacctcggcactgccgtggctgaccaccgccgtgctgtggacgggtgtcgcgttcctggcctggtacgcaatgaagtcggcacgccgtgcgatcgccggtggcggtggcatgggcgaggccgacagtgacgacggcagccgccgcgcggtgctgatggccgcggtcggcttctcgctgatcaacccgcacttctggctggacatgatggtgatcggttcgatcgccgagaacttcggcaacgcccgcatggccttcgccgctggcgtggtcaccgccagctgcctgtggttgaccgcgcagggcctgggtgcacgcctgctggcgccgctgttcaccaagcccagtacctggcgcgtgctcgacggcaccattgccgtgatcctcagcatcctggccctcacgttggcggtgcgcggggtccactga

SEQ ID NO: 536134 - DNA, 1983 bp, Stenotrophomonas maltophilia
atgcgcaggattgtgctggctgtactgttgggagcggttgtgggtggggcatcggccgcagcgctggacctggatcgctatctgcggcaggagtcgtttaccgacatcaagatttcgccggggggcgagtacatcgccgcgacggttccgctggaggcgggaaccgccttggcgatctatcgcattgccgacatgaagatggtcggcagcttccgcccgccccgcaacgatcacgcccacaccttcgactgggtcagcaacgagcgactgctggtgggcatggcacagaagttcggcgtgctggaccggccgacgccgaccggcgaactgttcggtatcaatgccaacggcaagggcggcgagctgctggtgggttaccgggttgccgaccagagcctgggcaccaacatcaaggtcaaaccggcaggcctggtggccgcgtacctcagcgacgaactcaaggatgacgatcgcaacgcactggtgacggtgatcccgctggtcggcagttcgcatgcccaggtcgagcgcatggatgtgatcaccggtcgccgcaacgcggtggcacgggctcccatccccgatgcggacttcacgatcgatgagcagggtgaggtgcgtttcgcgcgcgctgtcgttaccgatggcacgcagaagctctactaccgcacaggcagcaacagcgactggatcctgctcaacgatgaatccctgagcaagcgcatcgagctgcccctcggcttctcggccgacggtcgcctggcgtacctgcaggtcgagcaggcagacggaccagatgccattgtcagctgggacccccagagcaatgaacgacgcaccgtgctgcgcgatgagagcgccgacccggcgcgcatcatccggcgccccggcagccgcgtgccggtcggggcactgttccttggcagtgcgccgcgaacggcattcttcgatgacgcctcgaacgaagcccgcctttaccgcagcctcgaagcgggcctgggcggagcggcctacatcacctccagcacgcgcgatggcaggacggtgctggtggaaacctggtcaggcagcaatccgggcgatttctatctctatgacacggttggcaagagtgcacggcacctgataagccgcagcgactggatcgaccccgcgctggcggcggaggtgcgtccgatcagcctgaaggcgcgcgatgggcgtccgctgcatggcttccttaccgtcccgcacggccgcgaggcccgtgcgctgccgatggtggtggtgccgcacggaggtccgatcggtgttgccgacgacggcgcctatgacgccgaggcgcagatgctggcggcggcaggttacgcggtattgcaggtgaatttccgcggctcttccggttatggccgggcccacatgcaggccgcgcgcaagcaatggggactgtcgatgcaggatgacgtcaccgatgccacgcgctgggcgatcgaacagggcgtggccgacaagaaccgcatctgcatctacggggccagttacggtgcctatgcggcaatgatgggggcggtgcgcgaaccgggcctctaccagtgcgcggcaggctacgtcggcatctacgacctgccgttgatgtacgcccgtggagacatccagagtgatgagtcaggcctggcctatctgcgcaactggctggggtcgcccaaggatctggcagagcgttccccggtgaatctggccgcgcaggtgcgggtgccggtattcctggccgcggggggccaggaccagcgtgcgccgatcgtgcacagtgaacgcatggaagctgcgttgaagaaggccggctcgccggtggaaaccctgttcgtcaagaacgaagggcatggtttctattctcctgccaatcaacgcacgtactacagcaggttgctggccttcctctcgcgcagcctggggggacaggtggccgcgcaggccgcgcctgcggaaaagagcagcgcgccctga

SEQ ID NO: 536135 - DNA, 1755 bp, Stenotrophomonas maltophilia
atgaattccaccgctatcgcttccgacgatttcctgggccaccccaagggcgtctacgtctgcttcttcaccgaaatgtgggagcgcttctccttctacggcatgaaggcgctgctgctgctgtacctgaccaaataccacctgttcggcgacaaggccggcctggacctgctcggtgcctacggcggcctggtgtactgcatcccggtattcggcggcatgctggccgaccgctggctgggcatgcgccgggcggtgctgttcggcggtatcctgctggtgctcggccaccttggcatggccttcgaaggccacgccgcgtaccgggtgaacggcgaagtggtgcgcgacacctcggcactggcggtgacctacctgtcgctggcactgatcatcatgggcgtcggcttcctcaagccgaacatctccaccatcgtcggcaagctgtacgccaaggacgatccgcgccgcgattcgggcttctcgctgttctacgccggcatcaacctcggcgcgctgttctcctcgctggtgtgcggcttcctcggcgaggcctatggctggaagtacggtttcggagcagccggtatcggcatgctggccggcctggcgatgttcctgtggggccagaagtacctgcagggccatgccgaaccgccgcaaccggcggcactgaagcagaaggtgctgggcctgccgcgcgaatggctcatctatctgtgcgcggtgctcggtgtgctgccggtggcgtggctgatgtgggccgccggcaatggcgcattcgcgctgggcggtgaaatcagcctggcgctgatgctgatgctggtggtgctgggcggcgtgctggtctggttcgcctggttcaccggcagcaagtgcacgccggtgcagcgccagcagatgatcgcgctgatggtgctgatcttcatggcgctggtgttcttcacgatgtacgagcagtcctacggctcgtgggtgaccttcaccgaccgcctgctgaccaaggacatcgtgccctcgctggtgatcaccggcggtaccccgctgccatggtcgatcatctcgctgctgctggcaccgctgggcttcgtggtcagcgcgcgcctgtccgagcggcgccccggttcggctgcgccgcgcacgttcttcgccgccatcgtcgtgctgatgctggtgctgctggtgcgcgactgcctggtgatcccgcagaccgccggctcgctgacctatctgggcggcctgttcctggtgctgctggcaccggccttcgccgcactgtggacgtggatggaccgccgcggctgggaaccgggcaagccggtcaaatcggcctggggtctggtgatcggcgcgctgtcgttcgtgccgctggcactggccgcacagcaggtcggcgctaccggcgagatggccagtgtgtggtggctggtgctggcctacttcctgctggccagtggcgagatgtgcttgtcgccggtcggcctgtcggcggtcacccagttggccgtgccgcgggtgatgagcctgatgatgggcacctggttcctggccaccgccttctcggaaacgctggccgcgctgttcggcaagctggccgcgatcgaggtgccagaaggcgaatcgctggacatggtggccgccgccggcgcctatgcgcacctgttctggctgctgatgtggatcggcctgggctgtgcgctggccgccttcattgccgcgccgctgctgaagaagatgatgcacggggtcaagtaa

SEQ ID NO: 536136 - DNA, 1173 bp, Stenotrophomonas maltophilia
atgcccccttccccctcccctcgcctggcctccatcgaccagctgcgcggcaccgtgatgctgttgatgttgctggaccacgtgcgcgagaccttcttcctgcagcaccaggtgagcgacccgatggacgcggcgacggtctcccctgcgctgttcgcctgccgtctgctggcccacctgtgcgcgcccgtgttcgtcctgttgaccggtctttcggcctggctgtacggccagcgccaggcggatccgcgccgggccacgtccgccttcctgctcaagcgcggcctgttcctggtcgtgctggaactgaccctggtgaacttcgcctggaccttccagctgccaccggacacgctgtacctgcaggtgatctgggccatcggcctgagcatgatcgcgctgggcggcctgttgtggctgccccgtcccgtcctgctggtggccgcggtcgcggtggtggccgggcacaacctgttcgacagcgtacggctgcagggcaatggcctgctgccggtgctgtggaaagtgctgcatcagcgcgactggatcgaggccggtgcgctgcgcctgcgcacgtcctatccgctgctgccctggatcggggtgattgcgctgggctacctgatggggccgtggttcggtcgcgagcgcgcgccagagcagcgccagcgatggctgctgtgggcaggcatcggcgcactggccctgttcgcactgctgcgattcgccaaccagtacggggatgcaccgtggcagtaccaaagcagcacgctgcgcacatggatgagcgtgttcaacatcaccaagtacccgccgtcgctgcagttcctgctgttgaccctgggcgtggggctgttgctgctgcgcctgtacgaatggccgccactggcgcgcgcactgcgcccgctggccgatatcggcgccgcgccgatgttcttctacctgctgcacctgtatgtgctgaaggggctgtacctggccgcgctggcgatcgggggaccgacgcacggtgacctgtacgccctggattcggtggccggcctgctgctggtggcctgtgcgctggcggtggtgctgtacccgccgacgcgggccttcgcgcggttcaaggcgcgaaggcgtgacctggcttggctgcgctacccggtgcgtgcctgcggcacgcgcctataa

SEQ ID NO: 536137 - DNA, 1965 bp, Stenotrophomonas maltophilia
atgaaccacgacgctgcgcccaagcagctcaccttccgcgcagtggccctggccatcgtgctggcggtggtgctgtcggccgcaaacgcctacctcggtctgttcgcaggcctgaccatcgccaccgccattcccgccgcggtgatttccatgggcgtgctgcgcctgctgggtggtggctccatcctcgagaacaacatcgtgcagaccggcgcctcggccggttcgtcgatcgccgccggtgtgatcttcaccatcccggcgttggtgatcatgggctactggccggacttcaagtactggtgggtgctgggcatcgccggcctgggtggcctgctgggcgtgctgttctcggtgccgctgcgccgttcgatgatcgtcgaagacccgcttccgttcccggagggcaaggctgcggccgaagtgctcaaggccggtgagaatccgggcccgggcctgaagatcctcggcctgtcggcggtgatcggtgccttcgtcaagctggccgcggaaagcggcatgcgcctgattcccgatgcctgggccacttcggcctacgtcggcagctccaaggtcaccgccttcatcggcaccaacctgtcgccggcactgctgggcgtgggctacatcgtcggcctcaacgtcggcatcgtggtggtgtccggctcgatcctgacctggcacatcgccattccgatctaccaggcgttcttcatgaacaccgatccggcactggccgcgtcggtcgccaccgcttcgtccaccgaagccgcgttcgccatctggggcgcgaagatgcgctacctgggcgtcggcgcgatgctgatcggtggcatctggaccctgatctcgctgcgcaagtcgctgctcaacggcgtcaagagcggctttgcagccgcccgcaagagcggcggcccggtgctggcgcacaccgagcgcgacctgccgatgaagtggatgctggtggccctggtggtcttcgtgctgccgctgctggccctgtaccaggccatcgtcggccagtggcacgtgtcgatcccgatgaccctcatcatgatcgtcgccggcttcctgttcgtgtcggtctcggcctacctggccggcctgatcggttcgtccaacaacccggtctcgggcatcaccatctccaccatcctgttcgcctcggccgtgctggtggtgctgctgggcgccgatggcctcaagccggtcggtgccggcggtgcgccgctgggtgcggtggctgcgatcatgatcggcgcggtggtgtgctgcgctgcggcggtcggcggtgacaacctgcaggacctcaaggccggctacatcgtcggcgccaccccgtggaagcagcagttgatgctgggcatcggtgcgttctcgtgcgcactgatcatggccccggtgctgaacctgctggctaccgcctacggcatcggcgtgaagtccgagctgcacccgaacgcgctggctgcaccgcaggccaacctgatggcctcggtggccaagggcctgttcggtggcgaactgccgtggaccttcatcggcatcggtgccgtggtcggcgccgccatcatcgccttcgacagctggctgaagtcgcgcaacgcacgcttccgcgtgccggtgctggccgccgccatcggtatctacctgccgctggaactgatggtgccgatcttcctcggtggcctgattgcccacctggtggagcgcttccacaaggtgcgcgccgatgacgaagaaggccgcgaccgcgtgcacaagccgggcgtgctgttcgctgccggcctgatcaccggcgaggcactgatgggcatcgccatcgcgattccgatcgtggtcagcagccgcgcagacgtgctggccgtgccgttccacctgccgggcgcacagtggatcggcctggccgtgctgttcctggtcggctggctgatctaccgcactggcaagtacgccaaggcgtaa

SEQ ID NO: 536138 - DNA, 2079 bp, Stenotrophomonas maltophilia
atgaaactgcgtcatgccctgctgccactgagcctgctggccgccctgcccagcgttgccgctgcccgtggcctggaagtccgcgacatggtggccatggaccgcgtctccgcgccggtactgaccgctgacggcggcaccgtggtgttcgccaagcgcagcgtcgacgccaacctgaaggcctccaccgcgctgttcgcacgcaacctgcgcacccgcgatgcggcgccgccgaagcagatcaccccggctggctggagtgtcaattccgcttcactgtcggccgatggccagaccgtgtacttcctcagcgccaagaacggcagccagcagctgtacgcgcagccgatcagcggcggtgctccgcgccagttgaccgacttcccggtggacgtggacagctaccacgtgtcgccgcaggacgaccgcgtgttgttcagcgctggcgtgttccaggcttgcgcctcggatctggcgtgcaccgagaagaagctgaaggacgtggccggcgccaaggccagcggcaaggtcttcgattcgctgttcgtgcgccactgggatacctggaacgacggccgccgcaataccctgttcgtggcgccgctgccgtcggccaaggccggcgcggtcaagggcgcttctgcactgagcgcgaccatcgatggcgacgcgccgtccaagccgttcggtggcaacgatgatttcgcgtggtcgccggatggtgccagcgtggtggccagcatccgtgtggccggcaagcaggagccgtggtcgaccaacttcgacctgtaccgcttcgacgccgcgggcaagcaggcaccggtcaacctgaccgcgtccaacccggcctgggatgccggcccggtgttcagcgccgacggcaaaaccctgttctaccgtgcgatgaagcgcccgggcttcgaagccgatcgctttggcctgatggcgatggacgttgccagcggcaagacgcgcgagatcgccccgcagtgggatcgttcggctggcggcatcgccctgtccgccgacggtgccagcatctacaccactgccgatgacctcggcgaacacccgctgttccagatcgacgtggccagcggcaaggccaccaagctgattggcgatggcagcgttactgctgtcgacgtggccggcaacagcgtggccatcacccgcaacagcctgaagagcaacgaccaggtactggtcggcctgctgccggccgcgggcgaagccatcggcgaactgcgcgcgctgaccccggctgctggcgacgtactgaaggacgtgaccttcggtgactacgaacagttcgagttcaagggctggaacaacgacaccgtgcacggctacgtggtcaagccgcacaactaccaggaaggcaagtcgtacccggtcgcgttcctgatccacggcggtccgcagggcagcttcggcaacggctggagctaccgctggaacccgcagacctacgcgggccagggctacgcggtggtgatgatcgatttccacggttccaccggctatggccaggccttcaccgatgcgatcagccagcactggggcgaccgcccgctggaagacctgcagaagggctgggacgcggcgctgaagaagtattccttcctcaacggtgacaaggcctgtgcgctgggcgcgagctacggtggcttcatggtcaactggatcgccggcaactggaacagcccgttcaagtgcctggtcaaccatgacggcgtgttcgaccagcgcatgatgggctacgccaccgaagagctgtggttcaccgagtgggagcagggcggtaccccgtaccagaaggccgcgaactacgagaagttcaacccggtcaaccacgtggcggactggaagaagccgatcctggtcatccacggccagcaggacttccgcattccggtcgagcagggcctggctgcgttcaccgctgcacagcgccagggcatcgaatcgaagttcctgtacttcccggacgagaaccactgggtgttgaagccgaacaacagcatcctgtggcatgacaccgtcaatgcctggctgaagcagcacatcggcaactga

SEQ ID NO: 536139 - DNA, 1317 bp, Stenotrophomonas maltophilia
atgttcccgccggtgggtgccgaccgttggtcggcacaccttcgccaacagcagccgagcatggctcggctctacaagagcacccgtatgatccagaacgacatcgtcgtcttcggcttgatcgccgccaccctcggcgccgtgttctggaccgcctcgcgcgagcagggcctgtggaagcgcttctacacgttcgtgccggcgctgctgctgtgctacctgattcccggcatctacaataccgtcggcctcatcgatggccagaacaccaagctctacaacccgatcgcacgcgacatcctgctgccggcggcgctgatcctgctgacgctggcggtggacatcaagggcatcctgcggctgggcccgaagctggtgctgatgtacctgggcgcgtcggccagcatcatgctcggcgcggtggtggcgttcctgttgatgcgcgcggtgcatccggaaaccgtggccggtgacacctgggccggcatggccgccctggcgggcagctggatcggcggcggcgccaacatgctggcgatgcgcgaagtgttcgacgtcaacgccaccacgttcggccagttcgcggtggtcgacgtgggtgtcggctacgtgtggatggccgcgctgatcttcctggccgggcgtgccgcgaagatcgatgcacgcagtggcgccgatacctcggccatcgatgaactgaaggagcgcatcgcgcgcttccaggccgagcacgagcgcattcccagccttaccgacctgatgctgatcgtggcggtggccttcggtggcgtgggcctgtcgcacgccatcggcgcgccgctggcggcgtggttcaaggccaacgtcagctgggcttcgcagttcagcctggatgcgccgttcgtgtgggtggtggtgctgtcgacctcgctgggcctgagcctgagcttcacccgtgcacgtaccctggaaggggcgggcgcctcgcggctgggctcgctgctgctgtatttcctgatcgcctgcatcggcatgcagatggatctgctggcgctgctggatcgcccgtggctgttcctgctcggcctgatctggattgccgtgcacatcgtgctgctgtggtgcctgggcaagctgctgaaggtgccgttcttctatttcgcgatcggttcgcaatcgaacatcggtggcccggcctcggcgccggtagtggcggccgcgttccatccggcgctggcgccggtgggcgtgctgctgggcacgatgggctatgcgaccggcacgtacctggcctacatcgtcggtattaccctgcgcgcgctggccgggcaggggtga

SEQ ID NO: 536140 - DNA, 483 bp, Stenotrophomonas maltophilia
atgaccgatacgacaaccgccgtggacatcacctgcgtgggcgacatcgccttcgccgatgcgcagcgcctgctcgccgcgcatggcctgcggctgcaccacgtcgcggccggtgaaccgattcccggcagctactggggcgagcccgaggccggcatcatcgccagcaacgtgtatgtgcgcgacgacactcccgtacattcgatgctgcacgaagcctgccacctgatcgtgctgccgccggagcggcgtgcgcaggtgcataccgacgccaccgactcggtggccgaggaagatgccacctgctacctgcagatcgtgctggccgggcagctgccgggtgttggcactgcgcggctgatggccgacatggatgcctgggggtatacgtatcggctgggatccaccaaggcgtggtttgaacaggacgccgaggatgcgcgggcgtggttgatcgaacgcgggttgctgcaggcggcgtaa

SEQ ID NO: 536141 - DNA, 261 bp, Stenotrophomonas maltophilia
atgggcctgtttgatttcctcaaagcgaagaagaccaccgccgaaaccgccaagaaccgcctgcagatcatcatcgcgcaggaacgcagcaaccgtggcggccccgattacctgccgctgctgcagcgtgagctgctggaagtgatcaagaagtacgtgaacatcgacgtcgatgcggtgaaggtcgacctggtgaaggatggccagcacgacgtgctggacatctccgtggcgctgcctgaaggcccggacaaaccctga

SEQ ID NO: 536142 - DNA, 810 bp, Stenotrophomonas maltophilia
ttggctgaaatcatcgtagtcacctccggcaagggcggcgtcggcaagaccacttccagcgcgagcctggcctgcggcctggcacggcgcggcaagaaggtggcggtgatcgacttcgacgtcggcctgcgcaacctcgacctgatcatgggctgcgaacgccgcgtggtgtacgacttcgtcaacgtcgtgcacggcgaagcgaccctcaagcaggccctgatcaaggacaagcgcttcgagaacctgtacgtgctggccgcctcgcagacccgcgacaaggacgcactgacccaggaaggcgtgggcaaggtcctgaaggacctggccgccgacggtttcgattacatcatctgcgattccccggccggcatcgagaagggcgccttcctggcgatgtacttcgccgaccgcgccgtggtggtggtaaacccggaagtgtcgtcggtgcgcgactcggaccgcatcatcggcctgctcgattcgaagacccacaaggccgagtccggccaggacgtgccggccttcctgctgctgacccgctacaccccgctgcgcgtggaaagtggcgagatgctcagcatcgccgacgtcgaggaagtgctcggcctgaaggcgattggcgtgatccccgagtcgggtgacgtgctcaacgcctccaacaagggcgagccggtcatcctggatgtcgagtccgctgccggccaggcctacgacgacgccgtcgcgcgcatcctcggcgaagaacgcccgatgcgcttcaccaacgtcgagaagaagggcttcttcagcaagctgttcggagggtaa

SEQ ID NO: 536143 - DNA, 846 bp, Stenotrophomonas maltophilia
atggacacgtgcccggcagctgccggcacaggcacagcggccgacggggacctgagcgtggcggtgaatttcgattacgaacaggccggtgaactgaagatcggccaggtgggcgtcgccaacctgcgcatccgcacccttgatgtcgagcgccttgtgcaggaaatgcgtgaacgcgtcacccgtgcgccgaaactgttcggccgcgcggcggtgatcctcgacttcggcggcctgagccaggtgccggacgtggctaccgcgcaggcgctggtcgatggcctgcgcagtgccggcgtgctgccggtggcgttggcctatggcaccagcgcggtcgacctgctctcgcagcagctcgggctgcccctgctggccaaattccgcgcccagtacgagcgtgccgaggccgagccggctccgccgccgtccgcgcctgaaccgcgtcgcgcggcccgtgccgaaccgaagccggcgccggccacgccggtggccaaggtcgccgacgccgccgcaccgcaacccggccgcatgcagctgggcaacgtgcgttcgggccagcagctgtacgctgagaactgcgacctgaccgtgatggccaccgtcggtgccggcgccgaagtcatcgccgacggcagcatccatatctacggcaccctgcgcggccgcgcgctggcaggggcccagggcaacaccgcggcacgcattttctgccgtgatttccatgcggaactggtggccattgcaggccactacaaggtactggacgatgtcccggacaacctgcgcggcaaagccgtgcaggtgtggctggaacaggaccagatcaagatcgctgcgctggactga

SEQ ID NO: 536144 - DNA, 597 bp, Stenotrophomonas maltophilia
atgtcgattgtcatccgcgacgtgcgcgagcacgagctcgattccgtcctggctttgaacaacaacgctggcctggccatccttcccctggatgcggcccgcctgcgcctgttctacgaaaccgctgagtatttccgcgtcgccgagcgcgacggcaacctggccggtttcctgatcggcttcggcagcgacagccagcacgacagcagcaacttcgcctggttcaagcagcagctggacaccccgttcttctatatcgaccgcatcgtggtcgccagccgccgtcgtggcggtggcgtcggccgtgcgttctatgccgacgcgcagagcttcgccgagctgcgctacccgcagatgacctgcgaagtcttcctcgaccatggcgccgatgccgccctgctcttccacggcagcttcggcttccgcgagctgggccagaacaccatgccgcaggtcgatgtgcgcgccagcatgctggccaaggaactgtgcagctacccgtgggtccaggagacctacggcggcaagctgccggatgtgtcatggacacgtgcccggcagctgccggcacaggcacagcggccgacggggacctga

SEQ ID NO: 536145 - DNA, 1203 bp, Stenotrophomonas maltophilia
atgttgggagtcctcagccatacccgcgtcctccgtctggccggcctgtttacctgggtcatggtcggcctgccactggcgtactcgcagttcgagaacctgcacagccgcagcgatatgggcagctgggcgatcctgctgttcgtcgcctacctgtccttcggcgccgcgtactactggctgacccgcctcctgcgcagcgacagcgacagtcacaccacctggctggaccgcggcctgctgctgctgctgacggtttcggcgctgggcgtcagctacctcagtggttccggccttggcagcatcctgatgatggtggctgccggcgtcattccgtggatgctgtcggcgcgcctgtgcgtgctgtggctgctggtcagccagctggcggtggccccggtctattacatgctgctgcacttcccgctgttcgaagccgtgatgcaatcgctgctgtatggcggcttttccatgttcatcttcgtgaccagccttgtcgcgcgacagcagacccaggcccgcgacgagcagcgaaggctcaattcggagctgcgcgccacccgcgccctgctggccgaaagcgcccgggtcaatgagcgaacccgcatttcgcgtgagctgcacgatcttctggggcatcagctgactgcgctgaccctgaacctggaagtggccggccacctggccgagggccaggcgctggaccatgtgaagcgctcgcacgccctggccaagctgttgctgggcaacgtgcgcgaggtggtcagccagctgcgtgagaccggcgccatcgatctggccgcggcactgcgcccgctgaccgagaatgtgccttcgctggacatccagctggacatcgaggatccgctgaacgtggaggacccgcagagggcccacgtgctgctgcgctgcacccaggagatcatcaccaacgcggtgcgccacgccggcgcccgccacctgtggatcaaggtgtaccgtgaagcccccgaccgggtggtggtggaggcccgcgacgacggtgtcggcgcggatatggtcaatgtgggcaatggcttgcgcggcatgcgcgagcgcctgcaacaatgtggtggccagctgcaggtcgaaacccgccccggtgaaggcttccggttgcgggcgacggtgccggcaacggtgctggtggccacccttaccaaggttcctgaaggagtgcgttga

SEQ ID NO: 536146 - DNA, 642 bp, Stenotrophomonas maltophilia
atgattcgcgtctgcctggtcgacgaccaaaccctggtgcggcagggaatccgctccctgctggcgctcgacgacggtatcgaggtggtggccgaggccggcgatggccggcaggcggtcgagctgataccgcaggtgcgtcccgacgtggtgctgatggacatgcgcatgccggtgatgtccgggctggaggcgctgcaggtgctgtcgcgccaggagcagctgccgccgaccatcatcctcaccaccttcgacgacgaccagctggtgctggccgggctcaaggccggtgccaagggctacctgctcaaggacgtgaccctggcgcagctggtcggtgccatccgcaccgtggccgaaggcggttcgctggtgcagccggccgtgacccagcgcctgctgtccggcctggagcacatgcgcaacgagttcgtcagcctggaccggccggacccgttgaccgaccgcgagaccgagatcctgcgcctgatggccagtggcttctccaacaaggagatcgccaattcgctgggtgtggccgaaggcaccatcaagaaccacgtgtccaacatcctgtccaagctgggcgtgcgcgaccgtacgcgtgccgtactgaaggcgttcgagcttcagctggtctga

SEQ ID NO: 536147 - DNA, 1074 bp, Stenotrophomonas maltophilia
atgacccgtattatcgagttcctgatcgccttggggatcgtggctggcctgttcgtcatcattggcgtatgtctgccgggcgagcgtcacatcaccgaaagcatcgagaccaaccgcaagatgacgatcgtgtacgacacggtcagcagcctgcgccgcttcaaggactggaacccgctggtactgcgcgatcccgccgttgaactgaagctgtccggcccggcctccggcgtcggtgccactctcgacttcacctccaaggacctgggcaccggttcctggaagatcaccgaagccgaagagaacaagcgtgttgcgatcgccatcgatgacgccaccaagggtcacgacaagatcaccaccttcacgctggagccgaccggcaagggtggccgcaacgtcaagatcacccaggactactcggtgaagtacggctttgacctgttcggccgttatgcaggcctgtatgtcagccgccagatcggcgacgacatcaagatgggtctgtcgcgcatggccaacatgctggccaccgtcccgaacgtggactaccgcaccccggaagccccgctgaccgatctgggcatcgtcgacgtgccggctgaagacctgctggtcgtcaacgccggtaacgtggaccgtggtcaggacacgatcaccaagtccatcaaggacaaccaggagtggatcaagcgcgtgatggaggccaatggccttgaagccgccggtccgttccgcatcatcaccaccgacttcggtcaggaaaagtacgccttcgacatcgcccagccggtgaagaagaagggtgctgaaggtgccaccgctgaagagctgaccgtcaagatcgacggtggcgctccggtcaagtacgtgcatgtggctccgcaccgttcggcgcatgccgcctacaccggccacatggcgggtctggacgtggcccgcaacggtctgcgtgcctgggccgtgacttccggcaacgaagtgatcgaccgtccgtacgaaacctggaaggacggcatcgacaagtcgttcaccccggaaggtacctacgacatctactgggccgtcaagtaa

SEQ ID NO: 536148 - DNA, 372 bp, Stenotrophomonas maltophilia
atgttcaatctcgaacgtcgcgcacgtaagccttcgctgctggcctgcctgggtgcgctgctggccgccgcctcgatcggcctgtcggcctacgcctcgcacggtgtggccgacccgctggcgcagcagcatctgaacatggcggtgctgtatgcgttcgcgcatggtgcggtactggtggcgctcggaccgcgcgcgcagggagcgatcgcgcacctggcgctgtacgtgctgctgctgggtgtgctgctgttttccggcagcctggtgggcggcgcgttgtggcagtggccgacgcgcatggcaccgattggcggcaccagcatgatggccggatgggtgttgctggggatcaatgcgttgaggcggtga

SEQ ID NO: 536149 - DNA, 810 bp, Stenotrophomonas maltophilia
atgcaacgacgcgcccccctgctgatcaataccgaggccatcgagctgtggcccgcccacctgctgcgtgcacgcagcaacctggatgcacgcctgctgtcgcaggcgcactgggtgctgcggcgcaagcgcgatggccgctacctggcggcggtactggcgcagggtgtgcacgccatggtgccgcgcctgccacgcgagcccggggtcgaggaagcactggcgctgctggatgccgcggcagcgcggcccttcgccgccgggctggaagaacaatggctgccgctggccgggttgcagcagcgcctgcagcagcttggcctggatgcacagcgctacgcggacggcagcggcttgccgctggaatccgaaccgtgcctgctgcacttcgccggtcgcgaccgcttcgcccgcccattgtggctgcgccgtggcgccgcgcagggctggcggcggatgcaactgcacgcggcacaggacggaattgcgctggacgcgatctccggcttccgcagccatgcctaccagctgggcatcttcgaacggaagctggcgcgcggcttgagcgtggcagagatcctgaaggtgaatgccgcaccggggttcagcgaacaccacagcggccacgcgctggacatcggcacgccgggcgacgcgccggccgaagaatcgttcgaagccaccgacgcgttcgcgtggctgcaggcccatgccggtgaacacggcttccatctgagctacccccgcgacaacccgcacggaatcgtctacgaaccgtggcactggtgctggaagccggccaacggctga

SEQ ID NO: 536150 - DNA, 594 bp, Stenotrophomonas maltophilia
atgggcggcagcgatcccaaaccctttgacgtggccgagagctcgccgctgcgcgtgctctggatcgtgttgccgctgctggctgccttcgtggcctgcctgtacgcacagctgtacaaggcaccggcaggcgccccctggatcgaagtgacgctgtcgccgccctggttccggatgggcggcagtgcggcatggagcctgatcgtcatcgctgtactcgctgtcgggctgggagccgcattcttccgccgccgcgtggcgctggccggcaacgtgctggacgtgcactcgacgatgtatcggcggcgcgtgccggtggcgcagctgcggctggaccaggccgaggtggtcgacctgcagcgtgaccgccgctacggcatccgtgtcaaaaccaatggctattcaatgccgggcttctactcgggccacttccgcctgcagggcggcggcaagggcttcgccctggtcaccgaccgtgcgcgcgtcctcgccctgccggtcagtgatggcagcacgctgctgctcagcgtggaccggccgcaggccctactcgatgcactgcgcaaggtggccgcgtcggcgccacggcagtaa

SEQ ID NO: 536151 - DNA, 180 bp, Stenotrophomonas maltophilia
atgagcacgcgctggagttaccagaccatcgaagtgaagaccacgatgatgggcaccctgaaggccgaggacatccagagtgaactgacccgccagggccagcttggctgggaactggtcaacgtcatcatcccggccccgatgcgcccggcgatgctggtgttcaagaaggaggcctga

SEQ ID NO: 536152 - DNA, 180 bp, Stenotrophomonas maltophilia
atgagtgagaagaaagcctatccgctgcgcatcaacgccgaggtcctggccgcggcgcagcgctgggccgacgacgagctgcgcagcctcaacgcgcagatcgaatacgtgctgcgcgacgccctgcgcagggcaggacgcctgccgaaacccacgccatcgccggaggacaaggaatga

SEQ ID NO: 536153 - DNA, 882 bp, Stenotrophomonas maltophilia
atgaaagagaactcgcttgcctccctcaacggcctcggcaccctggccggatccctgctggctgcgctggccggcggggcgctgttcgtgctgggggtggcggccaaggccagcaccggctcgcccaacctgctgctgatgctggccggcgtgctggtggtcactgccgcggtcttcatcctggccggcctgtacaccatccagcccaaccaggcggccgtgctgagcctgttcggcaagtacgtcggcaccgtcaaggacaacggcctgcgctggaacaaccccttctacgccaagcgccgggtcagccagcgcgtgcgcaacttcgagagcggcaagctgaaggtcaacgagctggacggcagcccgatcgagatcgccgcagtgatcgtctggcaggtggtcgacgcctccgaagcggtctacaacgtggacgactacgagagcttcgtgcacatccagtccgaatccgcgctgcgtgcgatggccaccagctatccctacgaccagcacgaggacggccagctggccctgcgaagccacgccagcgagatctcccagcacctgaagaacgagctggccgagcgcctggccgatgcgggtgtgcaggtgatcgacgcgcgcatcagccacctggcctacgccgctgaaattgcccaggccatgctgcagcgccagcaggccaacgcggtgatcgccgcacgcacgcgcatcgtggccggtgcggtcggcatggtcgagatggccctggccgaactgcagaagaacggcgtggttgagctggacgaggagcgcaaggcgcacatggtcagcaacctgctgaccgtgctgtgctcggaccgcggcacccagccgatcgtcaatgccggctcgctgtattga

SEQ ID NO: 536154 - DNA, 1188 bp, Stenotrophomonas maltophilia
atggccaagcttggaactccgttgtctccctccgccacccgcgtgctgctgctgggctcgggcgaactcggcaaggaggtggccatcgagctgcagcggctgggtgtggaggtgatcgccgctgaccgttacgccgacgccccggcgatgcaggtcgcgcaccgctcgcacgtgatcgacatgctggacgcgatggccctgcgcgcgctgatcgcccaggagcagccgcacctggtagtgccggagatcgaggccatccacaccgaaaccctggtccagctggaacaggagcagggcctgcgggtgatcccgaccgcgcgtgctgcacgcctgaccatggaccgcgagggcatccgccgcctggccgccgagaccctgggcctgccgacctcgccgtaccgcttcgtcgataccgaggccgagtaccgtgctgccgtggccgccatcggcctgccgtgcgtggtcaagccggtgatgtcgtcctcgggcaagggccagagcaccttgcgcagcgaggcagatatcgcacccgcctgggagtatgcgcagaccggtggccgtgccggtgctggccgctgcatcgtcgaaggtttcatcgattttgattacgagatcaccctgctgaccgtgcgccacgccggcggcacctcgttctgcgcaccgatcggccacctgcagaaggacggcgactatcgcgaaagttggcagccgcagccgatgtcgagcgcggcactggcgcgcgcggaagagatctcgcgcgcgatcaccgacgacctcggtggctggggcctgttcggcgtggagctgttcgtgaagggcgacgaagtgtggttcagcgaagtgtcgccgcgcccgcacgacaccggcctggtgacgctggtatcgcaggagctgagcgagttcgcgctgcacgcgcgcgccatcctcggcctgccgattccggtgatccgccagagcggcccgtcggcctcgtgcgcgctgctggcgcacggcgagggcgtgccgtacttcaacaacgtcgccgccgccctgcacgtgccggacaccgccgtgcgcctgttcggcaagccgagcgtgcacggccatcgccgcgtgggcgtgaccctggcgcgcgcggaaaccattgacgaagcacgcgccatcgcgcgtgatgccgccgacgccatcggcgtcgaactgcgcccgtaa

SEQ ID NO: 536155 - DNA, 1215 bp, Stenotrophomonas maltophilia
atgaacatgacccgccgccatcccctgatcctcgccctggccctgctctgcggcgccaccgcccctgccttcgccacgtcccccgcgatgaccgaaaagccgtccactgcgctgcgcctggctacctacaacacctcgctgtactccgacgacgccggtggcctgatcaaggaactggaaggcgacagcgagcacgcacgcaagatcgccgcggtactgcagcaggtgcgcccggatctggtgctgctgaacgaattcgatttcgacgacgcccatcgcgccgccgacctgttccagaagcgctacctggaagtcgcccagcccggcggcggcaagccgctgcacttcgcctaccgctatctggccccggtcaataccggcgtgcccagtggcctggacctggacaacaacggcgtggtcggcggcgaaggccgcagccgcggcaacgatgcgtggggctacggcctgcacccgggccagtacggcatgctggtgctgtcgcgttacccgatcgatgaagccaaggtacgcagcttccagctgctgaaatggagtgcgatgccgggtgccatccgcccggtcgatccgcgtaccggccagagcttctacaacgaccaggtgtggtcgcagctgcgcctgtcgtcgaagtcgcattgggacgtgccggtgaagaccccggccggcgtggtgcatgcgctggtctcgcacccgaccccgccggtgttcgacggcccggagaagcgcaacgcggcgcgcaaccacgacgagctgcgcctgtggcaggagtacctttccaagggtgacaagccgtggctgtgtgacgacaagggccagtgcggtggcctggcgcaggacgcacgcttcgtgatcctgggcgacctcaacaacgacccggtcgacggcgatggccgccatgaggcgatcgtcgagctgatcgaaaacgcccgcgtgctgcgctaccccaccccgcgcagcgtcggcggtgagcagaccagcctggcctatgcggccaagggcatcgagcgcaagggcgcaccgttccacgccaccggcgacttcggcccgaagtccggcaccatgcgcctggactacgtactgccctcgaccggtttcgagtacatcggcagcggcatcttctggccggccaatgaaagcccggaggcgaagatcgccgacggcagcgaccaccacctggtgtgggtggatgtgcggtag

SEQ ID NO: 536156 - DNA, 756 bp, Stenotrophomonas maltophilia
atggcgatgcatggcgacagagacgacgaactgcggcttttccagaccggcgagcacccctgcgggtactggtcggaccgggtggcacgcgacctggtgctggacccgaacgaccgccgcctcggtgcgctctatccgctggcactgagctggggcttccgccgcagcggcgatctggtctaccggccccattgcgcgcactgccaggcctgcgtggcggtgcggatcccggtggcgcgcttcgctccggaccgcagccagcgccgctgcgccgcccgcaatgccgacctggaggtacggatcaccgccgccaccgcccgcgacgacctgttcgcgctgtatcaccgctacctcacccaccgtcacgccaatggcggcatggacgaccacggcccgcacgaattcgagcagttcctgatcggcagctggtcgcacactcgtttcatggaaatgcgcctgcccggccacgacggccagcccagccaactgctgggggtggcggtgaccgacgtcaccgagcacggcctgtcggcggtctacacgttcttcgacccggaccacgccgcgcgcgggctgggcaccttcgcgatcctgcagcagattgaatgggcgcgccgcgagggcctgccacacgtgtacctgggctactggatccgcggccaccagaagatggactacaagcgccgcttccatccgctggaggcgtacgacggccgccgctggcacgatttcgacaacgaactggacgggcgctga

SEQ ID NO: 536157 - DNA, 561 bp, Stenotrophomonas maltophilia
atgatccgtacccccctgctgctggccctgctgctcggcacctccgcttccggtatcgcgctcgctgccgacaccccggccacgcccgcgcagcgtccggccaagctggacaccaacggcgacggcgtcatcgaccgcggcgaagccgctgccaacccgcgcctggccgcgaagttcgacgagctggacaagaacaaggacggcaagctctcgcgcgatgagctgccgcgctggaagcatggtcgccgtggccacggcggtgagcgctgggccaagctggacgtcaacaaggacggccgcatcagccgcgaggaagccaaggccgatccgcgcctggccgcgcgcttcgaccagcttgatctgaacaaggacggctatctggacaaggccgaccgcgagctgcgtatgaagcagcatcgtgatgcctggttcgctgccgccgacaccaacaaggacggccagctgagcaaggccgagttcgacgccgccaagggcccgatgcacggtggcccgcgccatggcggtccgcgcgacggtggcgcaccggcgccgcagcgctga

SEQ ID NO: 536158 - DNA, 1218 bp, Stenotrophomonas maltophilia
atgacgacgttcgccgcatcgatcgaccagaccctggaacgcgaactgcccgctgccgccagcggttgccagcacgcctacggccgcatcgtgctggcctgccagaacacggtcaccgccatcgcgctggccatcacccgcgaccgccaggccagcgaggacattgcccaggaagcctttgtgaagggctggcagcagctgcaccagctgcgcagcgcgaccagcttcctgccgtggctgcggcagatcacccgcaacctggcccgcgactggctgcgcgcccagcgcggccgtccactgaccggcgaggcggccgaggtggcgatggggatggccgcagatccgtcgccgggcgccgccgatcgcctgcagcgggtggaggaagaaatcgccgccgaggacatcatctccaccctacccgccgacagccgcgaagtgctgttgctgtactaccgcgaaggccagcgctcgcagcaagtggccgacctgctcggtctcagcgacgcggcggtgcgcaagcgcctgtcgcgcgcccgcaccctggtgcgcgacggcctgctgcagcgcttcggtgagttcgcacgcagcagcgcgccgagcgctgcattcgccaccgccgtggtgtcgatggtcctggtggccgcacccggcaccgctagtgccgcgatcctgctcagcaccggcgtcggcgtgggcggcagcaagctgggcctgggcggcgtcagtgccgcaggcggcgcagccatgggttcactgacggccgccgccagccagctgcacctgatacccgccagcaactgggccgccgttgccgggggcgtcgtcggtggcatcatcggcagctatctggggggccgcttcctgctgcgcttcgcagacaccccgcaggaacgggcggccgtgcgacggttcgtgcacctcaatacgttcactgcgatggtcgtctgcaccagcctgttggtttcgctgatgctgcaggtgccgctgtggctgcaacttgccattctcgtcatcggcctgggtacggtgaactaccagtgcctggtgccgctgcagcgcgtgatggcccccatgatcgcgcgtgattcggcgcggcgcggccgcagcggaaccaactggcaatacgaatccgtctacgggcgcaccggcatcatcggcgcgaacgtcttcgtgatcgccctggtggtgtatgcattgatgcgcagcggaaacgtataa

SEQ ID NO: 536159 - DNA, 510 bp, Stenotrophomonas maltophilia
atgcgccagatcttcagcagccagcgcgtggaaaccgtcgaaggcgtagccgacctgctgcgcgagcacggcatcgacgtcaaggtgaccaacgggcgctcgtacaagacccgccgccgcggtcagttcagctataccgacctgggcaacgccaacgcctacccggcagtctggatcgtgcgcgccgacgatcagccgcgcgcacgcgaaatcctgcgcgaggcccgcctgctcgacaccacccgccgcgaccacccaaccgccgagttcgccttccgcgacaccgccgaaacgagcggcagcggccgcggctgggcctggcgcatccgcatcgccctgctggtggtgatcgccggcgtggcgctggtgatcggcctgcgccatcgcggcgccccggcacctgccgcaccggcccctgccccgcaggcccagccgcagcaggcgcaaccggcccctcagggcgcgccggaagaggaagaaatccgggtccgtatccagccctccaagtaa

SEQ ID NO: 536160 - DNA, 921 bp, Stenotrophomonas maltophilia
gtggccgcccccttgaacgacacgcccgaacccgtcgtctccgagctgatcgacctgctcaccctggagcggctggaggacaacctgttccgcgggcagagccgcgacatcggcaccaagtacgtattcggcgggcaggtgctgggccaggcgctggccgcggcccaggccacggtcgacaacggccgccacgtgcactcactgcacgcctacttcctgcgcgccggcaacatcgaccacccgatcgtctacgacgtggaccgcacccgcgacggcggcagcttctcggtacgccgggtcactgcgatccagcacggcaaggtgatcttcttctgcgcggcctcgttccagcaggccgagaccggcgccgagcaccagcacaagatgcccgaagtgccgcagccggaagacatcgaaccgaaccgtccgctgccggccgaagtgctggagcggctgccgatcaaggtgcagcgctggctgtcgcgcggcggcccgttcgagttccgccatgtctacccgcgtgacgaactgaacccgcccaagcgtccgccctaccaccaggtgtggctgcgcctgagcgagccggtcggcgacgccccggaactgcaccaggcgctgctggcctatgcctccgatttccacctgctgggaacggcaaccttcccgcacggcatcagctattaccacccgcacgtgcagatggcctcgctcgaccacgcgatctggttccatcgcccgttccgcgccgatgactggctgctgtactccctggacagccccagcgcgcaggattcgcgcggcctggcccgcggccagttcttcacccgcaacggcgtgctggtggccagtaccgcgcaggagggcctgatccgcgtggttcccgaccaggccgcggccgccgccgtgccggccaaggagtaa

SEQ ID NO: 536161 - DNA, 777 bp, Stenotrophomonas maltophilia
atgacgacgctcatcgaggtgatcaaccatggccccatccgcgaactgcgcctggcgcggccgccggtcaacgcactggacaccgaactgtgccggcagttgatccatgccatcgagctggccatggccgaagacgcgcacggcatcgtgctgtcgggcagcgagcgcatcttcaccggcggcatggacgtgccgcacctgctctcgcatggagatgacaagcacacgttgctggacacctggaacgccttctttggcgccgtgcgcacgctggccgagagccgcattccggtggtcgcggcgatcaccggccacgccccggcgggtggctgcgtgctggccctgtgctgcgactaccgcgtcatggcgcgcagcgccgatccgtcgcgaccgtatgccatcggcctgaacgaagtgcaggtcggcctgatcgcaccggagggcatccagcgcctgctgcgccgtgcggtgggcgtgcaccgcgccggtgtcctgctgaccaccggttcgctggtgccggccgaacaggcgctgcagatcggcctggtcgacgaactgaccgaaggtgacctggtggtcgcgcgtgccgtggcctggctgcagaacctgctcaagcagccgcgccagccgatgctgctgacccgcgccatcgcccgcgcggacctgcacgtggcgctgcagccggacctgatccagctcgaccgcttcgtcgaggcctggtttgcgccggacgcacagaacgccctgcaggcgctcgtggcccgcctcggcaaatag

SEQ ID NO: 536162 - DNA, 447 bp, Stenotrophomonas maltophilia
atgataaccaaaccattcgttggcgtactgttggttctgtgtgcggccgcagcatcggtttcggcggcggaaccggcctgcgtcgcggtggagcagggctgggcgcggttgccaccgaatccggcgatgccgatgaccgccggctacggcgtgatccacaacggctgcagcaaggcggtggtgatcaccggcgcaagcagtgcggtgtttggcgatgtgtcgctgcacgaaaccaccatcgtcgatggggtcagccggatgcgcgcgatcgagcgcctgccattggcaccgggcgcgcgtgccgagctcaagcccggtggcctgcacctgatgctgatgcagggcaagggcccgttgaaggaaggccaggcgctgccgctgcggctgcagctggaaggcggtggcgaagcgagtgcggcgctgaccgtgcgcaaggctgcgccgtaa

SEQ ID NO: 536163 - DNA, 726 bp, Stenotrophomonas maltophilia
atgatccaccagactgaactgagcgacctgctgcccggcatggtccccttccccaccgacgtcttccccgctgaccaggcgtggctcgcccagcatctgctgccgctgctgaagatcgacctgggcgtgctgcgcccggaactggccggccaggtggcaacgatgctgtgcccgatcgagccgtatgacggctgcatcggcgagaccaccgaagaacaccacaacgatttcaccggcaccaactggatcgccttcgaactgaccgccggcaacgagatgcgctttctcggcaacgagggctatttcatcggcgacgcggtgcaggacaagcacgcgcaggaacacatcgcacagatgcgcgagagctacgccaaggcccgcgactaccatgccgcgcacggccgtctcgcctgctactcgcgctacggcaacggtgaggccagcgagcgcgattacctggatacgctggggggacggatttcctgtggcaactggatcgaaacagccgatattccggccgccttcaccctggaattcaccgacgccgccaacgaccggcatgctccagatgatgccgaactggcgatcatccgccacggtggccacaagttcttcgccgtggccgaagtcgctggctacaactggtgcgccaccggcgccgacgcgatagtgatgctgtatgagccggtgagccgcacggtgctgttctcgtacgattggacgtag

SEQ ID NO: 536164 - DNA, 408 bp, Stenotrophomonas maltophilia
atgagcagcgaacacaagatcctggcccgcatcccgatcagcgtgcgctggcgtgacatggacagcatgggccacgtcaacaacgccaagtacatttcctacctggaggaagcgcgcgtgcgctggatgctgggcgttgaaggcgtgtcgatgaccgaccgcatcgcaccggtggtggccgcgaccaacgtcaactaccggctgccgatcgtgtggcccaacgacatcctggtcgagctgttcgtcgagcgcctgggcaacagcagcgtgaccatcggccatcgcatcgtcgaccagcaggatgattcgaagctgtattccgacggtaacgtggtggtggtctggatggatacgcagaccggcaggagcgcaccgctgccggaggcgatccgcagcgcgtcgagctga

SEQ ID NO: 536165 - DNA, 2985 bp, Stenotrophomonas maltophilia
atggcgatggatttcatccgcatccgcggcgcgcggacgcacaatctgaagaacctcgacctcgacctgccccgcgacaagctgatcgtgatcaccggcctgtccggttcgggcaagtcctcgctggcgttcgacaccatctatgcagaaggccagcgccgctacgtcgagtcgctgtcggcctatgcgcgccagttcctgagcgtgatggaaaagccggacctggaccacatcgaaggcctgtccccggccatctcgatcgaacagaagtcgacctcgcacaacccgcgttcgacggtcggcaccatcaccgagatctacgactacctgcgcctgctgtacgcccgcgtcggcaccccgcgctgcccggaccacggctatccgctggaagcgcagacggtcagccagatggtcgatcaggtactgaccctggacccggaacagcgctacatgctgctggccccggtcatccgcgaccgcaagggcgaacacgcccaggtgttcgaccagctgcgcgcgcagggcttcgtgcgtgtgcgcgtggacggcgagctgcatgaaatcgacgcggtgccgccgctggcgctgcgccagaagcacaccatcgaggcggtgatcgaccgcttccgcccgcgcgaggacatcaagcagcgcctggccgagagcttcgagaccgcgctgaagctcggcgatggcatggcctcggtgcagagcctggacgccgccgacgccacgccggcactgttctcctccaagtactcctgcccggtctgcgactactcgctgccggagctggaaccgcgcctgttctcgttcaacgcaccgatgggtgcctgtcccggctgcgatggcctgggcatcgccgagttcttcgacccttcgcgcgtggtggtgcatccggagctgtcgctggctgctggtgcggtgcgtggctgggaccgtcgcaacgcctactacttccagctgatcgcctcgctggccaagcactacaagttcgacgtggacgccgcgtggaactcgctgtcggccaaggtgcagcaggccgtgctgtacggcagcggcgacgaaacgatcacctttacctacttcaccgaagccggtggccgcacccagcgcaagcatcgcttcgagggcatcattcccaacctcgaacgccgctacaaggaaaccgagtcaccggcggtgcgcgaggagctgtccaagtacatcagcgaacaaccgtgcccggaatgcaacggcgcgcgcctgaacaaggcggcacgcaacgtgttcgtggccgatcgtccgctaccggagctggtggtgctgccgatcgacgaggcactgaagttcttcagcgaactgagcctgccgggctggcgcggcgagatcgccgcgaagatcgtcaaggagatcggcgaacgcctcggcttcctggtcgatgtcggcctggattacctgaccctggagcgcaaggccgacaccctgtccggtggcgaggcgcagcgcatccgcctggccagccagatcggcgccggcctggtcggcgtgatgtacgtgctcgacgagccgtcgatcggcctgcaccagcgcgacaacgaacgcctgctcggcaccctcacccgcctgcgtgacctgggcaacacggtgatcgtggtcgagcacgacgaggatgcgatccgcctggccgactatgtgctggacatcggcccgggcgcgggcgtgcatggcggagagatcgtcggccagggcaccctgcaggacatcctggaagccccgcgctcgctgaccggccagtacctgtcgggcaagcgcgcgatcgagatcccggcgcgccggcacacgccgaacccgaagatgaccctgcaccttcgcggggcgaccggcaacaacctgaagggcgtggacctggcgattccgtcgggcctgctgacctgcgtgaccggcgtgtccggctcgggcaagtcgaccctgatcaacgacaccctgttctcgctggccgccaacgagatcaacggcgcctcgcacccgatcgctccctacaaggagatcgatggcctggacctgttcgacaaggtggtggacatcgaccagtcgccgatcggccgcaccccgcgttcgaacccggccacctacaccggcctgttcacgccgctgcgcgaactgttcgcacaggttcccgaggcgcgtgcgcgcggctactcgccgggccgcttcagcttcaacgtgcgcggcggccgctgcgaagcctgccagggtgacggcctgatcaaggtcgaaatgcacttcctgccggacgtgtacgtgccctgcgatgtgtgccatggcaagcgctacaaccgcgagacgctggagatcctgtacaagggcttcaacatcaacgacgtgctggaaatgaccgtcgaggatgcgctgaagctgttcgaaccggtgccgtcgatcgcacgcaagctggaaacgctggtcgacgtcggcctgagctacatcaagctgggccagagcgcgaccacgctctccggtggtgaagcgcagcgcgtgaagctgtccaaggaactgtcgcgccgcgataccggccgcaccctgtacatcctcgacgagccgaccaccggcctgcacttccacgacatcgaagcgttgctgggcgtgctgcacaagctgcgcgacgaaggcaacacggtagtggtgatcgagcacaacctcgatgtgatcaagaccgccgactggatcgtcgatctgggcccggaaggcggccaccgcggtggcacgatcctggtgaccggcacgccggaagacgtggccgcctgcccgcagtcgtataccggccagttcctggcgcgcatgctgccctccaccaacgcacgcccggaacaaccggccgccgtggccaacaagcccgatgcgcgcccgccgcgcaaggtgaagcctgagaagcccgcgaagaaggccgccgccgccaagagcaccggcaaggccagcaagagcacgacgaagaagaaggacgcctga

SEQ ID NO: 536166 - DNA, 309 bp, Stenotrophomonas maltophilia; identical to SEQ ID NO: 492778

SEQ ID NO: 536167 - DNA, 264 bp, Stenotrophomonas maltophilia
atggcacataaaaagggcgtaggctcctcgcgcaacggtcgcgactccaacccgaagtacctgggcgtcaagatcttcggcggccaggccatcgaagccggcaacatcatcgtgcgtcagcgcggcacccagttccatccgggttcgggcgttggcctgggccgtgaccacaccctgttcgccctcgtggacggcaaggtggagttctcggtcaagggcgccaagaagcgccgcaccgtcagcatcgtctcggccgacgcctga

SEQ ID NO: 536168 - DNA, 1053 bp, Stenotrophomonas maltophilia
atgaaactggtagacgaagcagaaatcgaagtgttcgccggcaacggcggcaacggctgcattggcttccgtcgcgagaagttcattccgctcggcggcccggacggcggcgacggcggtgcgggcggcagcgtttacatccgcgccgacgaaaacctgaacaccctggtcgacttccgccatgagcgcatcttcaaggcgcagcgtggcgagaacggcatggggcgccaggcctatggcaagggcggcgaagacctgaccatcaccgtgccggtcggcaccgtggtgatcaacgtcgccaccgatgaagtcatcggcgacctgacccagcacggcgatcgcctgctggtggccaagggcggccgcggtggcctgggcaacatgcacttcaagagctcgaccaatcgctcgccgcgccaggcgctgccgggcgagccgggtgaggagcgcacgctgaagctggagctgaagctgctggccgacgtcggcctgctgggcttccccaatgccggcaagagcaccctgatccgtgccgtttcggctgcaacgccgaaggtggccgattacccgttcaccacgctgtacccgaacctgggcgtggtgaaggtggagaaccaccgcagcttcgtgatcgccgacattccgggcctgatcgaaggcgctgcggacggcgccggcctgggtgcgcagttcctgcgccacctgcagcgcacccgcctgctgctgcacctggtggacatctcgccgatggaaggcggcgtggaggggatttcgccggtggagcaggtgcgtgcgatcgaacgcgagctggagaagcacgatccggagctgctgaacaagccgcgctggctggtgctgaacaaggctgacctgatgttcgaagacgaggcgcaggccgcggccgagcagatcgtcgccgagctgggctggaaggagccgtggttcctggtctccgcgctgggccgcgaaggcaccttcccgatcatgagccggatcatggcgttcttcgatcgccagaaggaagacgagctggaagcccgcaacgcgcagtaa

SEQ ID NO: 536169 - DNA, 270 bp, Stenotrophomonas maltophilia
gtggccaatatcaagtccgccaagaagcgcgccaagcagaccgtcgtgcgcaacgcgcgcaacgtggctcagcgctcgatgctgcgcaccgctgtcaagaaagtgatcaaggcgctggacgccaacgatgccgccggcgccgaagccgccttcgccgttgcccagccgatcctggatcgcttcagcgcgcgtggcctgatccacaagaacaaggctgctcgccataagagccgcctgaacgaccgcatcaaggccctcaaggccgcctga

SEQ ID NO: 536170 - DNA, 1605 bp, Stenotrophomonas maltophilia
atgttgcgaggcctgctgtcgttcagcagcatgaccatggtctcgcgggtgctcggacttgtccgggaccaggtgatcaccaccacgttcggcaccaatgcggtcaccgatgcgttctgggttgccttcagggtacccaatttcctgcgccggttgttcgccgaaggctctttcgccaccgctttcgtgccggtgttcacggaagtgaaggaaacccgcagccacgccgaactgcgtgagttgatggcccgcaccgccggtaccctgggtggggtgctgatgctggtcaccgccgtggcgctgatcttcgcaccgcagctggcctcggtcttctcaagcggcgttgataccgacccggtgaagcagggcctgctgatcgacctgttccgcctgaccttcccgttcctgttgttcgtctcgctcaccgcgctggccggcggtgcgctgaacagcttccagcgcttcgccatgccggcgctgaccccggtcatcctcaacctgtgcatgatcgccggtgcgctgtggctggccccgcggctgggcggcactccagagaagcagatcctggcactgggctgggcggtactggccgccggtatcctgcaactgctgttccagctgccctcactgaagggcatcaacctgctgaccctgccgcgctggggctggagccacccgggcgtgcgcaaagtgatgacgctgatggtgccgaccctgttcggctcgtcggtggcgcagatcaacctgctgctggacaccgtcatcgcggccaagctgaccgatggctcgcagtcctggctgtcgctggccgaccgcttcctggagctgccgctgggcgtgttcggcgtggcgctgggcacggtgatcctgccggcgctggcccgccaccacgtgagtactgaccgcgagggcttctcgcgctcgctggactggggcctgcgcatgaccctgctgatctccgtgccggccatgctgggcctgctgctgctggccgagccgctgatcgcgaccatcttccagcatggccagttcagcgccttcgacacccgcatgaccgcgctgtcggtgtacggcctgagcttcggcctgccggcgttcgccctgttgaaagtggtgctgccggcgttctacgcccgccaggacaccaagactccggtccgtgccggtgtggccgcgctggtggccaacatggtgttcaacttcgcgctgctggccgtgctgtaccaggtgatggtgcccgatgagctgaaagcgcagggcgtaatggcggccatcggcaagcagccgggcctgcacctggcgctgggcattgccagcgcactgtccagttacctgaacctgggcctgttgtggtactggctgggcaagaccgacgtctaccagcgccggccgggctggggcggctatctgctgcgcctgctgctggcctgtgcggccatggttggtgtgctgctggccctgttgcactggctgccagcgttctccgcgatgggtgtctgggagcggatcggcagcctgtcgctgctggtcggcggtggcggtgcgacctacgcggtggccatgctggcgatgggcttccgcccgcgcgacctgcgtgggcattga

SEQ ID NO: 536171 - DNA, 948 bp, Stenotrophomonas maltophilia
atgagcaggctgttcagaagcgtcgagggcggggagctgttcccgaacggaagcgtggtctgtatcggtgcattcgacggcctccacctgggtcatcgtgcgctggtccgccacgcggttgcccgcgcgcgcgccttgggcgtggccgcggtggccgtggcgttcgagccgctgccgcgtgaattcttcgcccagggcacgccgccgccgcggctgaccctggcccgcagcaaggtcgagatcctgcgcgagctcggtgtcgatgcgatcggcctgctgcgtttcgacgcggcaatggcggcgatgccggccgagaccttcgtgcaccagctgcttgtcaatcgcctgagtgcgcgtgaggtctggatcgggccggagttctgcttcggcaaccgccgtcgcggcgacctggccctgctgcagaagatgggcgccgaactgggctttaccgcgggtgaaatcgaagcggtcgacctgcatggcgagcgcatctccagcacccgcatccgccagctgctgcaggagggcgacttcgcccgcgccaacgatctgctgggccgaccgtacgcgatcagcggccgggtggtgcgcgggcgccagctcggccgtacgctgggcttccccaccgccaacctgcgtttcccgaagacccctgcgctgtcgggcatctacgcgacctgggtgcacggcgtgttcgaccagccgtggccgtcggtgtccagcttcggcacgcggccgacggtggagggcgtggagccgctgctggaagcccacctgttcgatttccagggcgacctgtacggtcgacacatcgaagtggaattcgtcgccaagctgcgcgacgaagagaaattcaatgatctggcggccctgaccgaccagatgcaccgcgacgccgaacaggcgcgcgccatcctttccgaacatagattgcgagccactgcgtga

SEQ ID NO: 536172 - DNA, 2832 bp, Stenotrophomonas maltophilia
gtgagccaggactacaagaccaccctgaacctgccagccaccgaattcccgatgcgcggcgacctgcccaagcgcgagccgggcattctggcgcagtgggaagcgcaggggctctaccagcagctgcgcgacaacgccgccggccgcccgctgttcgtgctgcacgatggcccgccgtacgccaacggccgcatccacctcggccacgcggtcaacaagatcctgaaggacatcatcgtcaagtcgcgctacctggccggcttcgatgcgccctacgtgccgggctgggactgccatggcctgccgatcgagatcgcggtcgaaaagaagtggggcaaggtcggcaccaagctcgacgccgttgaattccggcagaagtgccgcgagttcgccgaagagcagatcaacatccagcgcgtggacttcaagcgcctgggcgtgaccggtgactgggacaacccgtacaagaccctgagcttcgacttcgaagccaacgagatccgtgcgctggccaaggtcgtggccaatggccacctggtccgcggcgccaagccggtgtactggtgcttcgactgtggctcggcgctggccgaggccgagatcgagtaccaggaaaaggaatcgccggcgatcgacgtggcctacgccgcgcgtgatgcgcaggccatcggccaggcgttcggcgtgagcgtgccggccgacgtcgaagtggcggtgccgatctggaccaccaccccgtggacgctgccggcctcgctggcggtgtcgctgggtgcggaaatcaactacgtgctggccgaaggcccggcgcacaacggcaagcgccgttggctggtgctggctgccgcgctggccgagcgcgcactgcagcgctacggcgtggacgaagtggtgctgcacggtgaaaccaccggcgcggcgctggaaaaccagctcctggcgcatccgttctacccggaacgcgggatcctggtgctcaacggcgaccatgtgtccgacgaggacggtaccggtgcggtgcataccgcccccggccatggccaggaagacttcgtggtcagccagaagtacggcctgctggacaagtacaacgccggccaggtgaccccgatcgacggccgtggcgtgtacctggaatcgaccccgccggcaggtgacgtggtgctggctggccagcacctgtggaaggcgcaggaggccatcgtcggcgtgctgcgcgacaacggttcgctgctggcgttccatccgatccgccacagctacccgcactgctggcgccacaagacgccggtggtgttccgcgccactccgcagtggttcatctcgatggacaaggccaacctgcgcaacgatgcgctggccgccatcgacaccgtcggctggttcccgacctggggcaaggcgcgcatccagagcatggtcgacggtcgtccggactggaccatctcgcgccagcgcacctggggtgtgccgatcgcactgttcacccatcgccagaccggcgagatccacccgcgttcggtggaactgatgcagcaggtcgccgaccgcgtcgaagccgagggcatcgacgtgtggtattcgctggatgctgccgaactgctgggtgccgaagcggccgactacgagaaggtcaccgacatcctcgacgtctggttcgattcgggcgtgactcatgagggcgtgctcgccgcgcgtggcttcggcaagccggccgatctgtacctggaaggttccgaccagcaccgtggctggttccagtcttcgctgctgaccggcgtggcgatcgacaagcgcgccccgtacaagcagtgcctgacccacggcttcaccgtggacgagcacggccgcaagatgtccaagtcgctgggcaacggcatcgagccgcaggacatcatgaacaagctgggcgcggacatcctgcgcctgtggatcgcctcggccgactacagcaacgagatgtcgctgtcgcaggagatcctcaagcgtaacgccgacgcctaccgtcgcctgcgcaacaccgcacgcttcctgctcggcaacctggacggtttcgatccggcccagcacctgcagccgctggatcagatggtcgcgctggaccgttggatcgtgcatcgcgcgtgggagctgcaggagaagatcaaggcggcctacgacggctacaacatggccgagatcgtgcagctgctgctgaacttctgcagcgtggacctgggctcgctgtacctggatgtgaccaaggaccgcctgtacacgatgccgaccgattcgcacggtcgccgttcggcgcagagcgcgatgtaccacatcgccgaagcgttcacccgctgggtcgcaccgatcctgaccttcaccgccgacgagctgtggggctacctgccgggcgagcacgccggccacgtgctgttcaccacctggtacgacggcctggcgccgctgccggccgatgcgcagctcaacgccgccgatttcgaccagctgctggctgtgcgcgagcaggtggccaaggtgctggaaccgatgcgcgccaacggtgccatcggtgccgcgctggaagcggaaatcaccatcgccgccagcgaagagcaggccgcgcgctggcagccgctggccgatgaactgcgtttcctgttcatcagtggtgacgtgcaggtgcgtccggcgaccaccgacgaggtgttcgtcagcgcccagccgaccaccaaggccaagtgcgtgcgttgctggcaccaccgcgccgacgtcggcagcaatgccgatcatccggagctgtgcggtcgctgcgtgagcaacatcaccggtgccggtgaagtgcggagctggttctga

SEQ ID NO: 536173 - DNA, 525 bp, Stenotrophomonas maltophilia
atggccgcgccccgtccacatccgaacgccctggtctggctgctgctgtcggcggcgatcatcggcctggaccagtggtccaaggcctgggtcctgtcgagcctgccggagttccagccggtggtggtcatcgacggcttctggaactggtaccgcacctacaacaccggcgctgcgttcagtttcctgagcgacgccggtggctggcagaagcacttcttcaccgtgctggcgatcaccatcagcggcctgatggcctggtggctgcgcggcaccgcccgtggcaactggaaggccgccgtgccgtatgcgctgatcatcggcggggccatcggcaacgtgatcgaccgccaggtgcacggccacgtggtcgatttcatccagtggtacgtgggcagctacacctggccctcgttcaacatcgccgattcggccatcgtggtgggtgccatcggcatcgccctgtttggcctgttcgacggcaagtccgccaaaaaggcggataatgccaatccgaaaccgtaa

SEQ ID NO: 536174 - DNA, 951 bp, Stenotrophomonas maltophilia
atggatgtgctgctcgccaacccgcgtggtttctgtgccggtgtcgatcgtgcgatcgagatcgtcaagcgcgcgatcgaaacgctgggcgcacccatctacgtccgccatgaagtggtgcacaaccgcttcgtggtcgacgacctgaagcagcgcggcgcgatcttcgtcgaagaactcgatgaagtgccggacaacaacacagtcattttcagcgcccatggcgtgtcccaggccgtgcgtcaggaagccgaccgccgtggcctgaaggtgttcgacgccacctgcccgctggtgaccaaggtgcacttcgaggtcgcccgccactgccgtgccggccgtgacgtggtgctgatcggccacgcgggtcacccggaagtggaaggcaccatgggccagtggaaccgcgaagccggcaccggccagatctacctggtggaggacgtggagcaggttgccacgctgcacatcaaccagccggaaaacttcgcctacaccacccagaccacgctgtcggtggacgacacgcgcggcatcatcgatgcattgcgcgagcgcttcccggcgatgcagggcccgaagaacgacgacatctgctacgccacgcagaaccgccaggacgccgtgcgcgacctggccaagcgctgcgacctggtgctggtggtcggttcgccgaacagctccaactccaaccgtctgagcgagctggcccgccgtgagggcgtggagtcgtacctgatcgacggcgcgcacgagatcgatccggcgtgggtggcaggcaagcagcacatcggcgtgaccgcaggtgcctcggcgccgcaggtgctggtcgacggcgtgctcgcgcgcctggccgagctgggcgccagcggcgtgggcgaactggacggcgaaccggaatcgatggtgttcgcgctgccgaaggaactgcggttgcggttggtcgactga

SEQ ID NO: 536175 - DNA, 1884 bp, Stenotrophomonas maltophilia
atgaagacccgagccttggcgatgtcgttgctgttcgcgctggcggccacgcctgcactggcgcagacctcgccaccggcgaacgcggcggctgccggcctgctgcgcatcgaggtcgacgcgcgcgatctggcccgtcgcatcttcaaggtgaccgccacggtgccggccaagcccggcccgatgaccctgctgtacccgcagtggattcccggcaaccattcgcccaccggcccgatcgacaagctggccggcctgcgcgtgaccgccaacggcaggccgctggcctggcagcgcgaccagtacaacgtctatgccttcaaggtgaacgtaccggagggcgtcagcgagatcgtcgcccacttcgatttcctgtcttcgcagggtggcagccaggggcgggtagtgatgaccccggagatgctcaacctgcagtggaatgccaattcgctgtatccggccggcatcgatgcacggcagctgcaggcgcaggccagcgtgaccctgcccaagggctggtcgttcgccactgcgctggaaaccgcgcgccgcgacggcgacaccgtggtgttcaagccgatctcctacgaccacctggtcgattcgccgttgttcgccggtgagcactaccagcgcatcgatctcgacccgggtgcgaaggtgccggtgcacctcaatgtgtttgccgacgacgccaagtcgctgaagccgagcgaggcgcagatcacgatgcaccgcgcgctggtgcagcaggccgacaagctctacggtgcgcgccactacaaccactatgagttcctgctggcattgaccgaccgcctcggtggcatcggcctggagcatcaccgttccagcgagaacagtgccgatccgggctacttcaccgagtgggacagcaacgcgtggatgcgtgacctgctgccgcacgagtacacccattcctggaacggcaagtaccgtcgcggcgccgacctggccaccgccaacttcaacgtgcccatgggcgacagcctgctgtgggtgtacgaagggcagacccagttctgggggcaggtgctggcagcacgctcggggttgtggtcggctgcgcaggcgcgcgacatgctggccaatgtggccgcgacctatgaccgtggccgcccgggcctggcctggcgtccgctgcaggacaccaccaatgacccgaccatcgcccagcgtcgcacgctgccgtatcgcaactaccagatgagcgaggactactactccggcggccagatgctgtggctggaagtggagggcaagctgcgcgaactgagcggcaaccgccgcagcctggacgacttcgcgcgcgcctttttcggcgtcggcaatggcgactgggacgtcaatccgtacaccttcaatgacgtggtcgcgaccttgaacggcatcgcgccgtacgactgggccacgttcctgcgcgggcgcctggacggccacggttcgttgactggcggcctggagctggcgggttggaagctggtctaccgcgataccccgaacgatgcctacaaggcgcaggagaagcgcgcgaaggcggcgctgctggcgtactcgctgggtgcggccgtgctcgacaacggcacggtcggtgatgtgatctgggacagcccggccttcaacgccggtcttgcacctggcatgaaggtgatcgcggtgggcgggcgcgagtacagcagccagcgcttgaaggacgcggtggctgcggcagcgaaggacaaggcgccgatcatgttgctggtgaagcagttcgaccgcattgaaaccatgagcatcgcttaccacggtggcctgcagtacccggtgctggagcgcatcaccggtaagcccgaccgccttgcagatctgtggaaggcgcgatga

SEQ ID NO: 536176 - DNA, 666 bp, Stenotrophomonas maltophilia
atgaagtcgcgcgtccgcgatggcgtggtcctgttgatggcgatcctcgccatcgtcggcgcgttcctgcacggcgatgggcgatggctgcactggctggccaagcccgcgaccacgctgctgatcgcggccatcgcctggcgtgtgcatgatccggcacagccgttctaccgccgcgcggtgctggccggcatgctgctgtcgtgcgtgggcgacatcgcgctgatgctgccgatggatgcgttcgtgccgggactggtcgcgttcctgctggcgcatgtctgctacatcgtcgccttccgcgatggcctgcgtgccgggcgtgggctgttcggcgccgctgtgctgctgggtgcatttgccgtgctcaacgtgatgggcctgtggccgcacctgccggtgccgatgcgtgtgccggtgctggcctacgtggtggtgctggcgtcgatggcggtgctggccctggcacggcagtggcgcagcccgcagcccggtgctgtggacgcccgaagcgcccgctgggccgcggcaggtgcattgctgttcgtggccagcgattccctgctggcctgggaccgcttcgccggtggcctgccgttggccagcctgctggtgttgtccacctactacggcgcgcagtacgccatcgcccgctcggtgaaatag

SEQ ID NO: 536177 - DNA, 720 bp, Stenotrophomonas maltophilia
atgaagcagcctccctccacccgcacggtgttcctggtactgctgctggttctggcgggcgcggccattgccggcggcgcagtgcagaccatcagcgaaacgctggggcattcggtacagccggaccggttgccaccctccgtcccgtctcagtcaccgcgcgaacaacccgtatcgcttgtgccgtccccggcgcccttccccgcggcgagtaccgctgcggcgcccgagcgcaacaatcgcctgttcgatgcggactacctgctggctgcccgtcaggcactggagcagctgccggcactggccggccagcggctgacggtcttccacagcatccacttctacgacgatggccgcatcaacctggatctggtcgatccgcaacagccgggccacgtcgacagctatcactttgaacgtggccagtggcgcaagggcaatccggtgaacccgcagcagttcgcgccgaccatcagcctgcagcgcagcagcacatccctggccagcatcgatttcgaggccgtgccgcgcgtggcgcaggcattgcaggaacaacgcaatgccctgcagaaccccgcatccgaagtcggccacgtgtatgtaatcgtgcgcaagggcggcaagctggtgtggctgccggacgaagtggccggtgaccgcgaatccgtgcgcctgcagttcgatgcgcagggctctctgcgcggcgtgcaccgccgatag

SEQ ID NO: 536178 - DNA, 957 bp, Stenotrophomonas maltophilia
atgaaagcctatctctggttctggggcgcgttcctgctgttcttcgcgttgccttttccctgcattctctatttcggcacttcgtggccggtggccctggtcgaccgcagtgcaccttggctggcactgttgctgctggcactgtccatcgccctgtggctgacgctgctgttcgccttcctgcactacctgctgctggggccgccgcgcgcactgcaccgggtgcagtcgatcctggccgacggtgaaccgcgcagtgcgctgatcgaacaggccgaacagaccggcgtgcaggtgcgcggcttcgcgcagtggaaactgcagttgtccttcaagaacctgtcaggtacgccgatccgcgaacagatgctggtggtcgacagcaaaccccagctgcatcgcttcgaggtgggcaggcacatcgatgcgcgcctgggccggacgcccggggcattccccaacatcgtgctggacggtgcgcagcccgaactgaatgtcgccagcctgtggcggcgtggcatcggtgcagcactcggcatcgcagccgttgccgctgcctatgtgttggcctaccggctgcagaacgaggggctgggctggaccttcctgtcgttcggtcacccgctgctggtatgcccgctggtgctgtgtggctatgcgctggggctgcgcctgctcggccgcctgctgcacgccgatgcccgcggtgatgcgctgaagtatcgcggcatcggcgtggaggcccgggtattgaaggtccgtcagaccggcacctacctcaacgaacaaccacaggtggagttccagctggaatacatcgaccgcgaaggcaacgtgcagcaggcccgcgtgcgccgcttcatcccgctgattgaactggccaacatcccgcgcgagcacgtaacgctgctgtacgacccggatgaccgcagcaacgtgcggctggagggaatatga

SEQ ID NO: 536179 - DNA, 2799 bp, Stenotrophomonas maltophilia
gtgacggcaggtctgggtgcgctgcagtgggggctgctccgcgccctgctatgccttgcactgggtgttgccgcactaccgatggccgatgccggcgagcccgccggcacgctggagatcgacgtgggtgcgggcccactggtgccggcactgcagcaatgggcccggcagagtggcaccgccctgctgttcgacgcacgtgaactggatgatctgcgcaccactggcacacgtggccaacgcgatacgggggcctccctgaagctgctggtcgccggcctgccggtgaacatcctgcgcacgtcctcgggtgcctttgtcgtgcgacgtatccatcccgagtcacctgccacgccaccgaaagcggtcgcagccccgcgcctgccgcacccggctcccaggtccgccgacacgccacaccaggtggaactggcacccatccacgtcaccggcagccggctgccgcgctcttcggtgcagaccacactgccggtcaccaccatcgatcgcgacgacatcctgcgcagtggctacggcaatctgttcgacctgctgcggcacctgcccggcatgaacggccatcccgccatgagtacctcgcgcggcggcgattcgcagtacctgccggtgggtgcagcggccaccaccagcctggacggcatgggcccgcgggcgacgctgttcctggtcaacggccggcgcctgccgcgttatcccatggtgtcgctggaacagggcgggctcaccgacctcggcggcattccgctgagcttcgtcgaccgcatcgaactggtacgcggcggtgcctcggccatctatggggccgatgccatgtccggcgtggtcaacatcatcctgcgcgaccaggccgatgggcccgaagccatgctgcagaccggactcagcagccgcggcgatgcgggccagtaccgcctgcaggccgccacgggcggcgcgcgtggcaatggggaccgctggtttgccggcctggatctgcaccgtgtcgagcatgtcgccggtgaccagcgtgactggcatgcggaaacctcgctgtatccgatcggcgcgatcttcggcaactggtacgtgcccgcccgacgctgcgagccgcccctgaagcggcgcgaggatggctgctggtttgacagcgcgcgcccgcgttcgctgcagcccgcctcggataccgcgtcggcctacctgcactaccggcatgaacgtggcgagggacgctatgcctatgtcgaggcacgggccagtcacaaccgtcagcgcttcgacctgggcccgactgccgttgccgtagtctcgcgcggaatcaccttcaacagtgtgctgcgcgaggccggcaacgtgcgccccagcgtccgcgccaccgatgcggacgtcaccctcggcatcggccgtgaccagggccggcgcagctgggaggcgggcatcagcgcgcagcgcagcgaagtcaccttgtccactgccggcaccgtgcgcacgacgcgcctgcttgaagcaacgcaggcgcgcaggttcactcccggtttcgacgcgccgccggcggccgaggtggacacgctgtttccatccatccgcaaccgcggcagaaccgcacagtggcagggttggtggggcgtgcagcgtgagctgatggcgttgcctggtggtcctgcacagctggccaccggcatcgacctgcgccatgaacgctggacctcgcgtcccgatgcgctgctcagccagggggacctcgcattgggcctgccgcagcagcaacgccgcctgtcgcgacaaagcagtggcgtctacaccgagctgggcctgccgctggcacccacgctgcgcgcggacctggctgcacgctgggaccgcgacggcggcttcatggcgttctcgcctcgtgccgggctgcgctggagcccgacgccgcactggtcgttcctgctggccagcgggcgcggttaccgtgcaccgagcctgttcgagcaacggcggcctcccggctacttcggctcgatcacgcttccggtgtccagtgcccttccggaatgtgcaatcgccacccgcggtggcggctgcagcgtcacggccaacgtcgtagagaacgatgcactgaaggccgagcgatcgcgcagccattcgctggcagccacgtggacgcccagcgatacgttctcgctgtcgctgacccacaacatcgtggaactgcgcaacgagatcctcgccctgcaacccagcgatgcggtgtggaatcgcagcacctgggaactggatgaagacggccacctgagcagcctgcgcctgtcgttcgacaacatcggccgcaccacctcccgcaactgggtgctgcgtggcgagtaccgcatcgacagcggcagcaacggccagtggttgttgtcgctcgatgcgctgaaacagcaggagctgcgccgccgccgtgaccacgaggccgccgtggacctgcgcggccatgtgacacccgagctggctgcggtgttgaacgtgcaatggcagaacagcaactgggacatcgccctgcgcggcaaccaggtcggtcgcacccgtgcctggctgcccggggccgagtgcccgcaggatcaggtcgaacagaaccactgcatgaatccacgccagctgcgctggaacctgcacctggcacgccgcctcggcccacgcatcgtcgcagcactggacgtgcacaatgtgctcgatgcgcaaccggtgaactatctggtcggcaatggcgggcagatgccggggctggacgatccgctcggccgctactacctgcttaccctgcagttccgctga

SEQ ID NO: 536180 - DNA, 969 bp, Stenotrophomonas maltophilia
atgagtggcaccccgcacagggatgatgcacagctgtttgaacgcgccagcgcctgggtagcccgcctggaagccccggactgcacgtcggtcgaacgcgaggcgttcgaggactggctggccgaagatccggcccacgtcaaagcctgggtgcaggccgaaaccctgttccagcagggtgcggcgcttgcggctgacccttggctgcgcaccgccgcggcacgggcggcgcgtccgccgcgccggcgctggctgccgggcgtggccgctgccgccggtgtctgcatggcgatcggcatcggctggatggttgccgtcgacggcaacccgacgccgcaggtctacgccaatgattcgcaccagccacagcagcagacgctggccgatggcagcgtcgccatgctggatgccggcaccactctccacgcccgcttcggctggcgccatcgtgatctggtgctggagcggggccggctgcaactgcaggtcgcaccgtcgaacaaggcgctgaaactgcacgccggcgacagtacgatccgcgacatcggcacgaccttccaggtcgaacgcctgcgcgacggcctggtcgaggtcgcgctgctggaaggtgccgtggaagtcagcaacggcgcagcgcagcacacactggcgcctggccaacagctgcaggtactgccctccggccgcatccagccgggccctgccctctcgtccaacgcagccgctgaaggctggctgcgggggcaactggtgttcgatgccacgcccctgtcgatcgtggtcgagcgcatgaaccgttatggccgcacgccgctggtgatcgtcgatccggagatcaccgacctggctgtaagcggcaccttccgcgccggtgatgcacaggagctgctgtcggcgctggaactgggttggtccgtggctggccagacgcgtccggatggcgcgctggaactgcgccgcacctactga

SEQ ID NO: 536181 - DNA, 414 bp, Stenotrophomonas maltophilia
atggagcggctgatccgctaccgcgcacagggcccggacgaactgcgcctgctgctgtatcgtatcgcccgcaaccgcctggcagaccgcggccgctcgccgcagtcgcggccgcatctgccgctggccgaacacgatggcagcgacgaaccgtccagttcctcgcccgatccattgcgccaggccgagtcagggcagatgctgtccctgctgcggcaggccctgttcaagctgcccgaacgcgcacgcgaggtctatctgctcaaccgcatcaccggcatgagctacacgcagatcgcgcggcattgtggaattactgccaagaccgtggaaaaacatatcgcccgggccctgcagggcctgcgtcaggagttgggatcggatccgctgcacaacgacagggacggccaatga

SEQ ID NO: 536182 - DNA, 2871 bp, Stenotrophomonas maltophilia
atgaagtattcgaagttgagcctggccctggccgggctgatgggcgttgccgccatatccgtggtggatgacgtcatggcaatgaattatcacgtgcagggcgatcgcatcttcctgagtggcgatgtgacctacgccgacgtggtgtccctgccggcactgctggccaaggcgcaggccgaaggccggccggtccgtgaggtggtgctgcgcacgtccaatggtggtgcgttgatcgccggcgagtggctgcagggcatcatccgcacctccggactgaacaccatcgtgtccggcaattgcatctcgtcctgctcgatcatgcagtctggcggcgtcgaacgctatctggccggcgatctgccgctcatcgactcggtgcagatccacgcggccagcagcggcggcaaggtgatctacacgccgtcgccgcgcatgacccagatctacaccggcaactacggtggtggcatggatgccgggctgctgcacaaggccatgtacgaagtggtgaagccgaacggcctgctggtgttccgcgatccggcacgcagcaccggttcctcggtcactttcgaccccgatggcagtggcagcaagctggagtcgttccccggccaggacatctacagcaacaggatcatcaccgcgaacgggtaccgcgatccgggcgacaccttgaatgtcaccgccaacgtgaccggcgacatcaaccccggctacctgcgtaccggacgccagttgcaggcgttcgtcgatgatgatttcgcgcgctggaataccgactggcgatccacctacatcaatctcgcgcagagcatctacaacgcatccagcaagggtccgcagggcatcggtgcgctgtcggtgcagggttacctcagtgacccggacatccaggacctgttgctgtccaagctgcggctggctgatctggatgtctccacgctggacaacgccatgggcgtgatccgggtgaccaacggcgccacctggcgcacgtccacgacgacgggtgcggatttcatgctggtcgacaatggcaccatcgcgctggaaggcggtgccctgcgcgcatcggaagtgcgcgtgctcggcgcaggcatgctggtcggccatggcgacgtggcgggtacggcgatggaccgcgctgcattgctggacggcaccggcccgtcgtaccgcgaagacggtttcaaccgcctgcgcgtgttcggcacgctgatgccgcgcggtggcgacctggtcacccatggctacgtcaacatcatgcctggcggcaaggtgctgttcgacgttacagagaatggtggcaccaccgccggccgcctgcgcgtgggcaccttcttcgatgacgagcagaccgagggggcactggtgatctccaagggtgccttcctcgaactgaacgtggcgcagggctactacggccaggacttccgtcgtgacctggttgagggcccgatctaccagggcggcttcgaagaggccgtgcgcctgggcgacaccagctacagcgccagcatcagcggtgatgtgttccgtccccgccacaattcgctgttgagcttcaacgtgaagcagacggccgatggcctgtggctgaccgccaacccgggctttgaccagctgggcctgttcgccaacggtacgtccggcgacggcctgggccgtgcgctggcgactgcttccgatcgccaggacaagggactgagatcgctgctgggcgcactgcagttcgccgaccgcgatgtgatcgcacaacaggccggtgccctgcgcggtgatgcgcacgccagcctgcgcctggccgacaccgcgctggtgggcagcatcggcaacgtcgtgcagcagcaccagtcggccatgcgcagcggcggcgatgccgatggcctggcctcgcaggtggcgcagtcggtctcctcccagccgggcatgcgccatggcagcctgttcaaccagctggcgatgcacctggtcgagccggcgccgggcagcgttgcgggtagcggtgacgccggacgcagccatggcatctgggcacgtggtttcgccagccatggccgcatcgatgccgaaggtggcgtggccggcctgagccacagcatcggtggcatcgtggtcggtgccgacacccgcgtggccgatgaccgcgtaaccctgggcgtcagcgtggccgcggcggacatgtcgaccaaggccagcgatggctctggtttcaccggtgatgtgcgcgcgctggacgtgggcggttacctcgatgcgacgtacgcgcgcggctatttgtcggcggccgtgcgctacaccgatctgcggcatgacacccgtcgtagcatcggcggtatcgatggcctgcagcagcccctgcgcgcgaagtacagcaacgatgcgatctccgcacgtgttgaacatgcgttctcgttcaccaccggcaagggcctggtgatccagccgttgctgccggtggtggactacgcgcgcacttcggccacccgcttcaacgaagggcagggcgccggtgcgttggttggccgcagtggcagcctggagagcatccgcgtgggtgcgggcctgcagctgttcaagaccttcgaaggcaacaacggtgagcgcatcaccccgcgcgcccgggtggtctggcagaaggagctgggcgattcgcaggcccgctacagcaccggcttcgccgcagctccggatctggtgttcggcgccagcagccaggcggtgggcgagcaggtgctggcctggaacctgggtgtgaccagccgtgccagcgagcggctgtcgatcatggccgattacgtgggcgagcgccgcgacgggcagatccagaacggcgtgatgctgggcctgggctacaggttctaa

SEQ ID NO: 536183 - DNA, 1005 bp, Stenotrophomonas maltophilia
atgcagatcgccgtcttcagtgcccgtccctacgaccgccgcttccttgatgaggcgaaccagcgcgatgcggctggggacggctttgcgttcgtgtacttcgatgtggcgctggacgtgcacacggcggcgctggcgcaggattgcgcagccgtatgcgtgttcgtcaacgaccgcctggatgcgccggtgctgcacaccctgcatgcgatgggggtgcgggccgtgctgctgcgatgcgcaggtttcaacaacgtggatctggcggttgcaaaagcgctggatctgttcgtcgcacgcgtaccggcctattcgccggaggcggtggccgagcatgcgctggcgctggtgatgaccctcaaccggcagacccatcgcgcctacaaccgggtgcgcgaaggcaacttcatgctcgatggcctgctcgggcgcaccctgcatggccgcaccgtgggcatcgtcggtaccggcaagatcggcctggccactgcgcgcatcttcaagggcatgggctgcatcgtgctggggcacgacccgtacccgtcgccggccttcgccggcgtgggcgacatggttgggctggatgaactgctggcgcgcgccgatatcgtgtcactgcattgcccactgacgcccgatacccagcacctgatcaacgacgcctcgctggcgcggatgaagaccggcgcgatgctggtcaacacctcgcgcggcgcgctggtcgatacccatgcggtgatccgcgcgctgaagtcgcggcggctgggtcatctggccatcgacgtctacgagcaggaaagcgcgctgttcttccaggacctgtccggcgagatcatcgatgatgaggccttccagcgcctgatgaccttccccaacgtgctggtgaccggccaccaggggttcttcaccgtagatgcgctgcaggagatctcggcaatcacgctggggaacctgcgggatttcgccgaggggcgggtgtgtgcgaaccgggtggaggcgagctga

SEQ ID NO: 536184 - DNA, 975 bp, Stenotrophomonas maltophilia; identical to SEQ ID NO: 536042

SEQ ID NO: 536185 - DNA, 915 bp, Stenotrophomonas maltophilia; identical to SEQ ID NO: 536043

SEQ ID NO: 536186 - DNA, 774 bp, Stenotrophomonas maltophilia; identical to SEQ ID NO: 536044

SEQ ID NO: 536187 - DNA, 417 bp, Stenotrophomonas maltophilia; identical to SEQ ID NO: 536045

SEQ ID NO: 536188 - DNA, 699 bp, Stenotrophomonas maltophilia; identical to SEQ ID NO: 536046

SEQ ID NO: 536189 - DNA, 669 bp, Stenotrophomonas maltophilia; identical to SEQ ID NO: 536047

SEQ ID NO: 536190 - DNA, 1224 bp, Stenotrophomonas maltophilia; identical to SEQ ID NO: 536048

SEQ ID NO: 536191 - DNA, 435 bp, Stenotrophomonas maltophilia
atgaagaagatcgtggtgagtctgatggcgtgcgtcgttcttgccggctgtgcaacccgtcagatcagctccgaacaggcgcaaccggtgcctgccgagcgggttttcgccttcaatgggataggtgacagtgcttccggacaggtaatcgttacgcgcgacgttggcgcggttggtggggcgtgcccgcttgcactgtatatcgacggcaccctggcagcccatctgcagcggggagagtctgtctcgctgtctgttccatccgggaatcgcattgtcagcgcaagtttcgcgggcaaagggctctgttcgtggggggatgaatcggcgcataggtgcgagatttcccaaatggtcacggcgggtggcaggaccaagatccgtctcgcgttggcccatgatggcgtgattcagatcggtccgaccgcgttctag

SEQ ID NO: 536192 - DNA, 336 bp, Stenotrophomonas maltophilia
atgcgcctgatcaaccgattgctgcactggaccaccctgcccgccgggcgccgcctgatggccgtgctgggtgccgcgctggtaatcgtgctggcctgcaatccggatctgctgccgttgttgccggtcgtggatgcgctggggctggacgtgctgatgctgctgctggctgcgcaggtggtggcggtcctgccttgggtgcgggagcgggccacgtgcggaaccagagtgctcgcacgcctgctgatcgccgcatcggcgggagcagcaggtggttatctccggcagctcgcgtggtggctggcgcgggacgcggtgatcgctggacgtaaatga

SEQ ID NO: 536193 - DNA, 636 bp, Stenotrophomonas maltophilia
atggacaagatcgacttcaagaagcgcgaccgggcgctgtatcaaccgcccgccggcaagttcgtacgggtcgatgtgccgcccctgccctacgtgatggtcgatggtcgcggcgacccgaacacggcccccgcctacctgcaggccgtgcagtggctgtattcggtgagctatgcactgaagttcgcactgaaggccacgggccaggactacgtggtgccaccgctggaagcactgtggagcgccgaggacccggccagcttcgtcgcgcggcggaaggatgagtgggtctggacggtgatgatccgcacgcccgagggcatcgaccctgcacagtggcaggccgcgatcagcaaggcgcgcacgaagctgggagaggctccacccagccttcgccatcagatccttgccgagggcccaagcctgcagaccttgcacgtgggcgcctacgacgacgaaggccccaccctggcgcagatgcatgacgaagtgatgcccgcactgggatacacctttgccggcccccatcatgagatctacctgagcgacccgcgcaggaccgacgcagcgcggttgaaaaccgtgctgcgacagccggtgcggccgatcgggcctgatgaggattcccgcatatga

SEQ ID NO: 536194 - DNA, 1041 bp, Stenotrophomonas maltophilia
atgattccgttgaaaacccttgggcgctggttgcgcccgggcctgctgctgtcgttgctggtgatgctcaccggctgcgatgccgtggccatcctcagtccgaagggccagatcggccaggatgagaagaccctgctgatcacggctaccgtgctcatgctgctggtcgtcatcccggtcatcatcatgaccctgaccttcgcgtggaagtatcgcgcctccaacaccaaggcccgttacgagccgaagtggtcccactcgacggcgatcgaggtggtggtgtggtccattccctgcatgatcgtgctggtgctggcggtcctgacctggcgttcgtcgcacgcactggacccgtacaagccgctggattcggacgtcaagccggtcaccatcgaggcgatctcgctggactggaagtggctgttcatctatccggaagagaaggtggcggtcgtcaacgaaatcaagttcccggtcaacacgccgctgaacttcaagatcacgtccgacacggtgatgaatgccttcttcatcccgcacctgggcagcatgatctactcgatggctgcgatggagaccaagctccatctgatcgccaacgagaccggtgaattcccgggcatgtcctcgcactacagcggcgcgggcttcgccaagatgcacttcaccgcctactcggtcaccgatgccgaataccgccagtggctggaccaggtccgtgccggcgagcagaccctggacaagacctcgttcaaggcgctgggtgaagcacgcaacgccgagtggtacccggtcacctacttcggcaagaccgaagaaggcctgttcgactgggtcatcgccaagcacatgggcgacaacaagcactacggcatgaagcactcgcacgctggtgccgccgctgccgatgccgccagccatgaagcgcacgagggccacgcccccagtgacgcacatgattccaaggaatcgggtgaaaacctggatgccaacgaacacgaacacgcgggccatgccggccacgcgggttcgggagaatga

SEQ ID NO: 536195 - DNA, 1998 bp, Stenotrophomonas maltophilia
atgttgggaaaactctctcttgagtcgatcccccacgatccaatcgtgctgaccaccctggtcggcgcggtgctgggtggcctgggcgtcatggccctgatcaccaagttcaagctgtggggctatctgtggaaggagtggttcacctcggtggatcacaagaagatcggcgtgatgtacctcatcgtcgccttcgtcatgctgctgcgcggtttctccgacgccatcatgatgcgtacccagcaggcgctcgccgtcggcgggtccgagggttacctgccgccgcaccactacgaccagatcttcaccgcccacggcgtgatcatgatcttcttcgtggcgatgccgctgatcaccggcctgatgaacctggccgtgccgctgcagatcggtgcgcgcgacgtcgcgttcccgttcgtcaactcgctcagcttctggctgttcgtgtcgggcgctgtgctgatcatgctgtcgctgtggatcggtgagttcgctgccaccggctggctggcgttcccgccgttgtcgggcatcgaatacagtccaagcgtcggcatggactactacatctggggtctacaggtcgcaggcctgggtaccacgctgagcggtatcaacttcttcatcaccatcctgaagatgcgtacccccagcatgaagctgatgcagatgccggtgttcacctggaccgccctggtgaccaacgtgctgatcgtggctgccttcccggtgctgaccatcaccctggtgctgctgaccctggaccgctacctgggtacgcacttcttcaccaatgatggtggcggcaacgccatgctgtacatcaacctgatctggatctggggtcacccggaggtgtacatcctggtcctgccggcgttcggtgtgttctccgaagtcatcgcgaccttctcgcgcaaggcgctgttcggctacaagggcatggtctacgccaccgcctgcatcggcgtgctgtcgttcatcgtatggctgcaccacttcttcaccatgggctcgggtgccaacgtcaatgccttcttcggcatcacgacgatgatcatttcgatcccgaccggcgtgaagatcttcaactggctgttcaccatgttccgcggccgcgtgcacttcaccaccccggtgctgtggaccatcggcttcatggtcaccttcgtcatcggcggcatgaccggcgtgatgctggcgattccggccatcgacttcgtgctgcacaacagcctgttcctgatcgcccacttccacaacgtcatcatcggcggcgtggtgttcggcatgttcgccggcatcacctactggtggccgaagatgttcggcttccgcctgaacgagttctggggcaagtgcgcgttctggtgctggttcatcggcttctacgtgaccttcatgccgatgtacgtgctgggcttcatgggcatgacccgtcgcctgcagagcaccgtcaacccggcctacgagccgctgctgctgatcgccgccgcaggtgccttcatcgttggcgccggcatcctgtgccagatcatccaggtggccgtgtcgatccgcgaccgcaagaagaccgtcgacctgaccggcgacccgtgggatgcccgtacgctggagtgggaaacctcttcgccgccggccttctacaacttcggcacgctgccggaagtcaccgagctggacgatttctgggagcgcaagcagcgtggtgaagcctggccgaagccggccaagtacaccgacatccacatgccgcgcaacaccggcacgggcgttgtcatcggtgccttcagcctggtgttcggcttcgcgatgatctggcacatctggtggctggccatcgtcggcttcgtcggcatgatcgccacgttcatctaccgcaccttcgaccaggacgtggactactgggtcccggccgccgaggtggaacgcatcgagaacgaacaccgcaagcacctggaagcccagggcctggtgaagtcggagctgaaggcatga

SEQ ID NO: 536196 - DNA, 639 bp, Stenotrophomonas maltophilia
atgagcaccaatacctcgaccctgagccacgggcacgccgcgcacgcggcggcccatggccatgacgaccacgagcaccacgacaccggcggcaataccgtcttcggtttctgggtgtacctgatgagcgactgcctcatcttcgcctcgctgttcgccacctacgtggtgctggcgggcggtaccgatggtggccccaccgcgaaggacctgttcgaactgccgttcgtggcatgggaaaccgcgctgctgctgacctcctcgctgaccttcggcctgggcatgatcgccatgcaccgcaagcagatgggccagatgtacctgtggctgggcatcacctggctgctgggcttcggcttcatgtgcatggaagtgtgggagttccagcacctgatccaccagggctacggtccggaccgcagtgccttcctgtcggcgttctttgccctggtcggtacccacggcctgcacgtcagcgccggcctgctgtggctgctggtaatgttcgtgcagctgaagaagtacggcctgaccccgaccaacaagacccgcatggcgtgcctgagcctgttctggcacttcctggacctgatctggatcggcgtgttctccgtcgtctacctcaatggagccctgtaa

SEQ ID NO: 536197 - DNA, 342 bp, Stenotrophomonas maltophilia
atggcacatgacaaccatgcacacgaccacggcaccggcggcgaaagccatggcaccgtgaagtcgtacctgatcggcttcgtgctggcggtggtgctgaccgtcatcccgttctggatggtgatgtcgggtgatttctcgcgcaccgtcaacggtgtggtgatcgcgatcaccgcggtgctgcagatgctggtccacctggtgttcttcctgcacctggaccgctcttcggaaagccgctggaacgtcaacgctgcggccttcaccgtggtggtgatcggcatcatcgtggtcggcaccctgtgggtcatgcacaacatgaacgtgcacatgatgcactga

SEQ ID NO: 536198 - DNA, 2058 bp, Stenotrophomonas maltophilia
atgactggcagttacagtcagagcctggtcgccatctccctgctggtggccattcttgcttcgtacacagcgctggacatggccggccgcctggccacggccgagggccgcgtggcccgctggtggctggccggcggtgcagcggcgatgggcctgggtatctggtcgatgcatttcatcggcatgctggccttcgacctgccgatcccggtcggctacgacctcggcatcaccctgtattcgctggcggtctcgatcggcgcttcggcctacgcactgtggctggtgtcacggcccagcctgccctggcgccggctgctggccggcgccgtactgatggggctgggcatcgccaccatgcactacctcggcatggccgcgatgcgtatgcagccgggcatcgactatcacccgggctggttcgccgcctccattgcggtggccatcggcgccgccggtgctgcgctgtggatcgcattccgcctgcgtgccgagcagcgcaacaccatgcgcctgcgcgcactggcctcgctggtgatgggcctggccatcgtcggcatgcactacaccggcatggccgcggcgcgcttcccggagggcagcatctgcggcgcggtcggcagcggtggcatcgacacgcgctggctggcggtgctggtgatcgtcaccaccgtggccacgctgggtatcgccctggtcgcctcgctgttcgaccggcagatgcgcgtgcgcaccggcctgctggccgattcgctggcgcatgccaacaacaagctgatccaggccgccctgcacgacccgttgacccagctgcccaaccgcatgctgctgcaggaccgcatcgagcaggccatcgagaaggcgcggcgccgcaaccatgcggtggcggtgatgttctgcgacctggatggcttcaaggcggtcaatgatgcctttggccaccagcttggcgaccgcctgctggtggcggtggcgcagcgcatcggcggcctgctgcgcccgcaggacacgttcgcccgcctcggcggcgacgagttcgtgatcgtgctggccatcgatattcccgacgatgcggtggtggtggccgagcgcatcattgccgccgccggtgagccgttcacgctggatgcggccgaactgcaggtcagcgccagcctgggcatcgccctgtacccggacgacgccagcaatgagcgcgaactgatggcgcacgccgatgcggcgatgtaccacaccaaggaaaccgggcggaacggctatacgttcttcaccccatcgatgcagctcagcgccaaccgtcagctgcgcctgctgcaggacctgcgcaaggccgtgatgcgcaatgaactgatcctgcattaccagcccaagttcccggccgcgggcgcgccagccaccggcgccgaggcgctgctgcgctggcagcatccggagctgggcctgctggcgccggacgtgttcatccccattgccgaacgcagcggcctgatcctgccgatcggcgactgggtgctggaccgcgcctgtgcgcagttgcgtgcgtggcacgatgccggacatgccgaatggtcgatggcagtgaacctgtcgcccttgcagttctcctccccggcccttctggacagcgtgcgcgaggtgctcgaacggcaccgcatcgagccggcgcggctgaccctggagatcaccgagaccacggcgatgaaggacgtcgacgccagcctggcgatcctcaacgacctgaccgcgatgggcgtgcacattgccatcgacgacttcggcacgggctattccagcctgctgtacctgaaacgcatgccggccaccgaactgaagatcgaccgcgcgttcgtgcatgacctggaatgcaatgaagaggatgccgccatcgtctcctcgatcatcgcgctgggacgcaccctgcagctgcaggtggtggccgaaggcgtggagacgcaggcgcagcgcgagtacctgagcgaactgggctgcgaccagttgcagggctaccacctgggccgaccgatggacgccgaggaatttctgcgccgggtgggctga

SEQ ID NO: 536199 - DNA, 1377 bp, Stenotrophomonas maltophilia
atggcaaaagcccgcatcgcctacgtctgcaatgaatgcggcgccgaattcagcaagtggcagggccagtgcaccgagtgcaacgcctggaactcgctgtcggaaatcgtgctggagagcgcggcggcggccaaggcgccaacgtcgcgccgggccggctgggcgggcaagatcgacccgccgaagatcaccgcgctgaaggacgtggagcagaccgagcaccgccgggtcagcaccggcatcggcgagttcgaccgcgtgctcggcggcggtctggtcgaaggcgcggtggtgctggtcggtggcgaccccggcatcggcaagtcgacgctgctgctgcaggcggtggcgaagatggcggctgaattgccggtgctgtacgtcaccggcgaagagtcgctggcgcaggtggccggccgcgcgcaccggctggagctgccgctggatggcgtcaatgcgctggccgagaccggcgtcgagtcgatcctgcagcatgcctccagggccggaccgcggctgatcgtggccgattccgtgcagaccctgtggaccgagagcctgaccgccgcgccgggttcggtcagccaggtgcgcgagagcgccgcgcgactggtgcgctttgccaaggagaccggcaccgccgtgttcctggtcggtcacgtgaccaaggagggcggcatcgccggcccgcgcgtgctcgagcacatggtcgatgcggtgctgtatttcgaaggcgagagcggcagccgcttccgcctgctgcgcgccttcaagaaccgcttcggtgcagtcaacgagctgggcgtgttcgcgatgggcgacaagggcctgaaggaggtctccaacccatcggcgatcttcctgtccggtggcagcacccatcaaccgggcagttgcgtgatggtcacccgcgagggcacccggccgctgctggtggaggtgcaggcgctggttgatgcgtcgccgctgtcgaacccgcgccgtgtcgcggttggcctggagcagaaccggctggccatgctgctggcggtgctgcatcgccacggcggtgtgctggtcggcgatcaggatgtgttcgtcaatgtggtcggtggcattcgcgtgcaggagaccgcggccgacctgccggtgctgctggcggtgctgtcctcgctgcaggatcggccgctggcggagaagaccattgccttcggcgaagtcggcctgtccggcgagatccggccggtgcccaatggcgaagaccgcctgcgtgaggcggccacccatggcttcaagcgcgccatcgtgcccaaggccaatgcgccgaagggcggttcggtgaaaggcatggaagtgatcgcggtggagcgcctgtccgaggccatcgacgcggcgtga

SEQ ID NO: 536200 - DNA, 1857 bp, Stenotrophomonas maltophilia
atgcaggacaccgcgctcaccgcccccaacgccgaaatccgtcgcgccggggtcgatctcaatggactgatgacggtgctgggcaagcacctgtattccaccccggtggtggcgctgcgtgagctggtgcagaacgcgcacgactcgatcatccgccgccgcatcgaacagcccggcgtcgcggtgcagtcgcgcatctcggtgcaggtcgatgccggtgccggcgtgctgcgcatctccgataccggtgccggcctgacccgccaggagatccacgattacctggccaccgtcggcgtcggctatacccgtggcctgcgccagggcggcgaggacgatgagggcctgatcggcatgttcggcctcggtttcctgtcggccttcgtgcttgcgcgccgggtcagcgtgcgtaccacctcgtaccagacgccggatctggggcacctgtacgtgtccagcaatgccgagcagtacaccgtcagtgaggtgccggcacgtgcgatcggtaccgaggtggaactggagctgcatccggatttcctgccactggccaacgaagcgcgcctgcacgaggtgctgggccgttactgtgcgctgctgtccgagccgatcttcatcggcgctgccggcgaggcgctcaatcccgagccgccgccgtggcgtggacagggcgacgtcgctgtgcacccggtgcaggcgcgccgccaggcgctgcagttcgcagcgcgcttcgagcacgatttcgagccgatcgtcaccgtgccgttgcgcggcgatggcaacagcgatgccaccggcctgctgtgggtgcaggacggtgctacctacggcaccagcgacaaccgcaacctgtcggtgttcgtgcgcggcatgctgttggatgacgatgcgcgcgacctgctgccgccctgggctgggttcattggcggggtgatcgaatcctcgcggctgacgcctaccgccagccgcgaagatctgcagcgcgacgaccagtaccgcgccgtgcagcatgcgctgctggaagcgctgattgatggcctggccgacgtcgcgcggcagcagccggaggcctggcgacgcgttctcacgcgccacaatgaggccctgctaggcgcagcgctgtgcgatgaccgcctgttcgacctgctgctggaacacgtgcgcgtgccgacttcgcagggcgacctgccagccagtgcgttgccggcacgcggtgcggtgcacgtgatcctcgacaatggcggcggcttcgaggaaatgctgttccgtgcgatgggcgtgccggtggcgcacggccatcgctatgcggtggtgccattcctgcggcgctgggcccaggccaagggcctgcgcctggtcgagctcggcacagagcagggcaaccgcgcgctgttccgcactgacgacagcctcgacgaggcgcagctggcatggctgcgtgagcagctgggcgatggtgaacagctgctgccggcacgcttcagtccggaggcattgccggtggtggtggtgcccgatcgcgaggccgaactgaagcagcgcctggaagacgatgagaacgacaagcgcgtctcgatggcggcgctgcgcctggcccggcagttcaccgcgcgcatcgaatcgcgcgcaccgtcgcggctgtacctcaacctcgacaacccggccgtgcaggcgctgttgcgcgcccagcgcgaggggcatccacaggccgaagccgcagcccgcctgctgcgctcactgaagatcatcgtcgccgcgcagggccgcccgctggcacgcgcgaacactacgtccggcccggatctcaacggcgcctttaccgatatcgctggtgccctgcagcagatgctgcgctga

SEQ ID NO: 536201 - DNA, 2307 bp, Stenotrophomonas maltophilia
atggacatctggaactgggtcgaaaaactgcagggtgacctgcgccaggcgggccaggcgcagaacgcgcacctgctgaaccgtctcgccgacgaggtgagcgaactgcgtgtcgaccgcgtcgacgcgctgctgcctgaagcgcgtgcgctgggcaaggcgctggacaacccgtgggtcgacgtctacgtcggccactgggcgctgcgcaatcgcgtcggcaaccgcgtcgaaggcaaaagcgcgctgggcgaagccgtggcgctgttcgagcgtgcgcatcgtgaggacacgatggagtgcccgcagtcgatctgcgtgacccaggatctggctgcctgctacggcaacatcgatggcccgggctgggttcccgaacgtgtcgaggtgtgcgatgaaacgcttgcacgcatcgatccaagctgggcctgcttccagtgcctgagctgcgaaaaggccgatgcgctgctggatgatggccgcggccaggatgcgctggattacctgcaggtgcagtcggatgcgatcgaggcctgcggcaaggaagtgttcgacagcttcccggaaatgcagatcaagatcctgctgggcatgggccgcgccgaagaagcgctgttgctgatcgagaagcgagaggccgaagtggccgcgtccggcgagtacgagccggccaactgcacggtgccgcgccgcctgtccaaggcatgggcgctggcccagctgggccgcgacgaagaggccgtgcagcagctggtgccgtggagcgaactgacgcctacctactggcgactgtgggcgaacacggccgcagcgctgtgccggcgcgatcctgcacgcaatacctgggatctgggcacgcgcttcaacaccatcatcgaacattttgccgaggttggctcgcaccgcctgctgatcgaggttgctgcgctgagccttgaactggcgctgcagcgaggtgcacgctgggtggcgctgcgccagctggaactggcgcgtacccatctggcgcagctgcgccaggaccgtggtgcggcagcattggtggccgacctggccgcgcgtatcgatgcattgcctgacgttgcgccgctgccggtgccggccagcgaactgctggcctggctgagcgagcagggggagcagaaccagtcgcgcgatccggagcgcgaggcccagtggctgctgcaggcacaggcgcagctgcccgatgacgaggcgctggctgagatggctgcctcggcattgagcgcctgtggtgcgcaggcggaagcgcgcgcattgctgtggcgattcgtgcgcgcacacgatcaggatgatggcccggccgcctacacgctgatgcgctggctgaccgagcagggcgacgacgagggcctgcgtcagctggccgggatctaccgtggcagcgtgccggtgttcgcgcactggtgcgaggtgcagcgtgcacgtcgcgtgtccgattggccggcgctggagcaggccgcgcaggcgctgctggccgcctcgccgggttcgcacggcgcgcggggcacgctggcgcgcatgtacatggaaaccggccgtttcagcgaagcacaggcctgctatgcgcagctggtggagctgctggaggaacccaacgccgcgcactgggaccacatgagtgcggccagcgcggcacgcgactgggatgcggtgcgccgctcggcggcggcgatcggcatggagttgtccagccaggatggcgtggtcgaggagccgtggggctgggtgatcatccgcagtgaagagaatggcgagccgatggagtactacgcccgtcgcagtggcccggtgaccgcacgcatcgtcgagaacgcaccggccaaccgtgcccagcaggtcggcgactgggtggtgtttgatgccgcgctggtgcacccggcgccggaggaagaagaggcccgcgagcacttcattccgacctatgcgcaggtccatgtgctggaacgcggtggttttgcccgcagctggctggtcgatggcgcgcacccgggcgaagaagcctggaatgcccttgtcgaagctgccgaagcacagggttggaaggtgtggtcgcacagccgcgcggactacaccgtcaccgaccccgacatggagggaggcaccctgccgggcgtgctgttcaccgttgcgcagccgcaggaccacgcaccgctggcgctgcaccgcttcctgcagcaggagaccgcgaagtggccgcacccacactgctggctgcggctggccgaagcctgcgaccaggaccgccagccgcatctggatgtgatcgagcgttacgggttgtaa

SEQ ID NO: 536202 - DNA, 438 bp, Stenotrophomonas maltophilia
atgattgccggcctgctgctggcgccagcagcacaggccgcgcccgcctgccaggaaccggcagctgtggcccgcgcgttctacgaggcgacgacggccgatggcgacctgctggaaccgccgcccgcgctggtcagcccggccttcggcaaggccctgcgcggcgagcgcgcctgccagcagcgcgaagagggcatctgcacgatcgattccgatccgtggctggacgcgcaggacggcgacatcgaaaccccggtgcgttacagctggcaagaggcgtcggccaccgccggcgaggtcgagatgcgctattcggtttggaagaaggcctacgtgacccgtctaccgatggtgcgccaggggcagggctgctggcaggtcgatgacatcctcaccaacagcggccgttcggtgcggaagatcctggcccagccttga

SEQ ID NO: 536203 - DNA, 795 bp, Stenotrophomonas maltophilia
atgacaatcgttctcatcgccgtcctgctctacctggctgccagtgccctgctggtgcgcgcgctcggccgcgatgaaagcaccggttcccccacctggctgtggcccgccctgccggcgatgctgctgcatggcggctaccacgtgatggtggcgatgcgcaccaacggcgggccggacatgcacttcttcgccgcgctgtcgctggtcggactgggcatggcctggctgacctcgctggtcggcgcgcgcgggcggatgtcggcactgggcgtggttgtgttcccgctggccgcagtactgctgctggcctaccacggctacggccacgaaccgagcaaggtgctgggctggcgcctggccagccacgcctggctggcgctgctggcctacgccacgctgagcatcgccgcgctgctggcgatcatgctgtggctgcaggagcgcgcactgcgccgccgcgagttccgcccgtggctgcgggcgctgccgccgctggccgacctggaatcgctgttgttccgggtcatcaccgtcggcttcgcgctgctgaccctgaccctggtcacaggtgtgctgttcgtcgacgacctgctggcacagaagctggtgcacaagaccgtgctgagcgtgctgtcgtggatcgtgttcggcgtgctgctgatcggccgccgccgctatggctggcgaggcatgaaggcggtgcactggacgctggcggcgatgctgttgctgctgctggcgttcttcggcagccagttcgtgatcgaactggtgttcgggcattcgcgatag

SEQ ID NO: 536204 - DNA, 1395 bp, Stenotrophomonas maltophilia
atgttcgagtccctgacccagcgcctttccggcaccatcgagcgcctgcgtggccgcggccgcctgaccgaggagaacatccgcgaggcgacccgcgaagtgcgcatcgcgctgctcgaggccgacgtggcgttgccggtggtgcaggccctgatcgagcgcatcaaggtgcgtgcggtcggccaggaagtgctgaagtcgctgaccccgggccaggcgctgatcaaggtcgtgcgcgacgagctgaccgcagtgatgggcgccgaagccagcgacctgaacctcaatgtgcccgcgccggccatcatcctgatggcgggcctgcagggcgccggcaagaccaccacggtgggcaagctggccaagcacctgaaggaaaagcgcaagaagaaggtgatggtggtctcggccgacgtctaccgtccggccgcgatcgaacagctgaagaccctggccgagcaggtcggcgtgctgttcttcccgtccagtgccgaccagaagccggaagccatcgtccgtgccgccatcgacgacgcgcgcaagtcgttcgtcgacgtgctgctggtcgataccgccggccgcctggccatcgacgaagcgatgatggccgagatcaaggccctgcacgctgcggtgaacccggccgaaaccctgttcgtggtcgacgccatgaccggccaggacgcggccaacaccgccaaggccttcggcgacgccctgccgctgaccggcgtggtgctgaccaagaccgacggtgacgcccgtggcggtgccgcactgagcgtgcgctacatcaccggcaagccgatcaagttcgtcggtgtcagcgaaaagccggaaggcctggacgtgttccacccggaccgtatcgccagccgcatcctcgacatgggcgatgtgctgtcgctggtcgagcaggtcgaacagcaggtcgacaaggacaaggccgccaagctggccgagaaggtcgccaagggcaagaagttcgacctgaacgacatgcgtgaccagctcgagcagatgcagaacatgggcggcatcggcggcctgatggacaagctgccgggcctgggcaacatccccgaccatctgaagcagcaggtcagccagggcaaggaagtgccgcgcatgatcgccatcatcaactcgatgaccaagaaggaacggcgcaatccgaacctgctcaacggctcgcgccgcgcgcgcatcgccaagggctcgggcgtgaccccggccgacgtcaacaagctgatgaagcagtacatgcagatggaaaagatgatgagcaagatggctggcggcggcatgaagggcatgttgcgcagcatgaagggcatgaagggcatgatgggcgccatgggcgccatgggcggccgcggcatgccgttccgttga

SEQ ID NO: 536205 - DNA, 1077 bp, Stenotrophomonas maltophilia
gtgaatgcatcgccgattcttgaacgcgccgacaccttctgtcggcgtttttcattgcagcttccgatcctgctggcaccgatggccggtgcctgcccggtgccgctgtcggctgcgctggccaatgccggcagcatgggcgcgatgggcgcggtgttgtcctcttcggccgatatcggtcgctggatggacgatttccgcgccgcttcgaccggcccggcgcaggtgaacctgtgggtgccggatccggtgccgacccgtgacgttgccgccgaggctgccagccgcaccttcctggcgcagtggggcccggacgtgccggccagcgccgccgatgccacgcccgccgacttcgaagaacagttcgccgcactgctggccgcacgcccggcggtggcctcgaccatcatgggtgtgttgctgccgcgccacgtgcagcagttgaaggatgccggcattgcctggatcgcctgcgcgaccaccttgtccgaagcgcgtgcagcacaggacgccggtgccgatgcggtggtggcgcagggcatggaagcgggtggccatcgcggtgcgttcgatccggcgatggccgagcgccagctggtcggcctgttcgcgctgctgccgcgcctggccgatcacctgcagattccggtgattgccgccggcggcatcgccgatggccgtggtatcgccgccgcactcaccttgggcgccagcgccgtgcagatcggcaccgcgttcctgcgcacgccggaagcggcgatcgcctcggcgtgggccgatgggctggctgccagcgaaccggaagacacctggccgacccgtgccttcagcggtcgtctgggccgtggtctggcgacaccctacgtgcgcgccgccgccgcagaaggcgccccggcgccgcgtccgtacccggtgcagcgcggcctgaccgcgccgatgcgcaagcaggccgtgcaggaaaaccgcctggccgcgatgcaggcctgggccgggcagtcggcatggatggcgccggcacagccggccgcagacgtgctgcgcggcatgtggagccaggcgcaggcactgctgcgatga

SEQ ID NO: 536206 - DNA, 783 bp, Stenotrophomonas maltophilia
atgacgctgacctgcaacggccagccggcgcaggtggaggatctgctgccggcgctcgtcaactacggccacttcacctcgctgcaggtgcgcgaccacgcggtgcagggactggacctgcatctggcgcggctgtcgcatgccacgcgcgagctgttcggtagcgagctggatatggcgcaggtgcgggcttggatggtgcaggcgctgcggcaagcggggcagggcgatgcctcgttgcgggtgacggtgtattcgcgccacttcgatttccgcaatccgctggcggcggtgcccgtggacgtgctggtggcggcgtccgcaccggtgacgctgaccgcctccaagcgtgtgcgcagcgtggcctggcagcgtgaactgccgcagatcaaacatgtgggcaccttcggcctgttcgccgagcgccgcgcggcgatggcggaaggattcgacgatgtgctgttcgtgaccgtcgatggcgaaatgagtgaaggcagcacctggaacctggccgtgcacgatggtgaacggctgctctggccgcaggcgccggccctgcgcgggaccgccgaggcgctgctgaagcagcattggccgggggcgcaggccacgcagccattgcggctggcggatatggccggcgtgaaagccgcttttgcctgcaacgccagcggtctgtgggcgctggaggccgtcgacgggcatgtcctgcccggctcgcaggcactggctgaacagggcagagcggtgcttgcggcggtggcttgggacggtttggggtga

SEQ ID NO: 536207 - DNA, 261 bp, Stenotrophomonas maltophilia
atggtcaagattcgactgacccgcggcggcgccaagaagcgtccgttctaccacatcatcgtgaccgacgtgcgcagcgcgcgcgacggccgcaacatcgagcgcgttggcttctacaacccggtcgcccagggcgccgagaagcgcatcgagctggacctggcccgcgttgaccattgggtcaagaacggcgcccagccgaccgacaaggtccgcaacctgatcaaggaagcgaccaagtcccaggccgctgcggcctga

SEQ ID NO: 536208 - DNA, 513 bp, Stenotrophomonas maltophilia
atgaaagatatcgagcgccgcatcctgctgggcagggttgtcggcgcttttggtgtgcgcggcgagatcaagctcgagtcctggaccgagccacgttccgccattttccgttaccagccgtggatcgtgcgcagcccgtccggcgtggaaaccacgattgaaggtgtacgcggccgcgacagcggcaagcacctggtcgcccgtttccccggcgtcgaggaccgcgataccgtcgaagcgatgcacggcaccgagatctacgtggcccgcagtgcattgccgccgccgaagccggatgagtactactgggtggacctggaaggcctggatgtgaagaccaccgagggcgttgccctgggccaggtctcgcatctgttcagcaccggcgccaacgacgtggtggtggtccggggtgaccgcgagcggatgattccgttcgtgcagccggacttcgtcaaatcggtcgacttcgaggccaacctggtcgtggtcgactgggatcccgagttctga

SEQ ID NO: 536209 - DNA, 759 bp, Stenotrophomonas maltophilia
atgcgtttcgacgtcatcaccctgttccccgagttcctcgcccagtccgctggactgggcgtggtcgggcgcgcgcaggagaaggggttgttcagcctgcatggctggaacccccgtgattacgccgaaggcaactaccgccgggtggacgaccgtccgttcggcggcggcccgggcatggtgatgctgatcgagccgttgcaggcctgcctgcaggcgatccgcgatgctgatccgaccccggcgcgggtgatctacctcagcccgcagggggcgccgttgacccaggccaaggtgcgggaactggcggcgctgccgcgcatggtcctgctctgcggccgctatgagggcattgatgagcgtttcctggaggccaatgtcgacgaggagatttccctcggcgactacgtgctgtctggtggcgagctgggcgcggcggtgatcatcgacgccgtggcccggctgcaggacggggccctgaacgacgctgaatcggcggcgcaggacagcttcgagggcgacctcggcctgctcgactgcccgcactacagccagccggcccagcacccgctgggggatgtgccggacgtgctgcgttcgggtaaccacgcggccatcgcggcctggcgccgccagcagtcgctggtccgtaccgcccagcgacgcccggacctgctggatgaacaggcgctgggcaaggccgaccgcaagctgctggaccaggcccgccaagcccggaaacacaaggccagcccctag

SEQ ID NO: 536210 - DNA, 402 bp, Stenotrophomonas maltophilia
atgagcaagctgaacaagtccatcgtcgcggaattcgaatccgcccagatcacccgtgaactgccgaagttcagccagggcgacaccgttgtcgtcaacgtgaaggtgaaggaaggcagccgcgagcgcgtgcaggcctacgaaggcgtcgtcatcgccaccaagaatgctggcctgaactcctcgttcaccgtccgcaagatctcgcacggctacggcgtcgagcgcgtgttccagacccacagcgccatcatcgactcggtcgaagtgaagcgtcgtggtaaggtccgcgccggcaagctgtactacctgcgtggcctggaaggcaaggctgcccgtatcaaggaagacctggctgccgctgctgccgccaaggctgcccgtctggccgacaaggcctga

SEQ ID NO: 536211 - DNA, 381 bp, Stenotrophomonas maltophilia
atgaatgacatcaaccggcactatccccccgtgatccagtcggcgttgcgcttcctcgacggcaaggggctggcacgcgtgcaatcggcgccgttgctgcatcgcctgctgtggcgcgtgggcatcgcactgccaccgccgatcctggccggcttcggcaccaacgcgctggtgcagggcctgttgttcgggctgttctggaccgcgctgatgtggctgatgctgtggcagggcagcgagcgcccgctggcgctgttgctggtggccgggctgttggccggtgcgctgttcggcgtggtgatggcggccctgatgcgctcgctgcgccgccaccgcaagctgccggactggcggcagttccgcgcgcggcaggcggactga

SEQ ID NO: 536212 - DNA, 435 bp, Stenotrophomonas maltophilia
atgcctgccaagcgaaccgcaccttccgccgcgcccacgctgttgtccggcggcaatccgcagatcgccaagggcgagggcaatgccccggtgcaggcgtatatcgcggcgatgccggactggaagcgtctgatcggcgaacagctggatgcgctgatcgagcaggctgcacccggcgtgcacaaggcggtgaagtggaactcgccgatgtatgcggtggccgcgggcgaaggctggtttctcagcttccattgcttcacccgctacatcaaggtggcgttcttccgtggcgctgcactgaagccgatgccacccgagccgtccaagagtgccgatacgcgctacctgcacatcccgcaggatggcgcgctggatgaagcgcagttcctcgactgggtgcgccaggccgccgcgctgcccggtgagcgcatgtaa

SEQ ID NO: 536213 - DNA, 408 bp, Stenotrophomonas maltophilia
atggccacgcatgcaccgaaccctgccgatgccggaaccccggcaactgaactgatcgatgcgcgcatcgccgagctgggcgactggcgtggcgaagtgctggcacgcgtgcgtgcgttgatccatgaagcgctgccggacgtgcaggaaacctggaagtggcgcggtacaccggtgtgggagcacaacggcatcctgtgcaccggcgagacctacaagcaggcggtgaagctgaccttcgccaacggggcggcgctggccgatccgaaaggcctgttcaacgccagcctggagggcaacacgcggcgcgcgatcgacatccatgaaggtgcgatgccgaatgccgctgcgttgaaggcgttgctgcgcgcggcggcggcgttcaacgcggcgaagaagaaacgctga

SEQ ID NO: 536214 - DNA, 1461 bp, Stenotrophomonas maltophilia
atggccaaagcgccgattgacctgacctccggcccgatcggccgcaatctcctgctgttttccctgccgatcctggcaggcaacatcgcgcagtcgctgaacggttcggtgaatgcggtctgggtcgggcgcttcctcggcgaggcggcactgaccgccaccgcgaacgccaacaacatcatgttcttcctcatcggctcggtgttcggcttcggcatggcctcgaccatcctgatcggccaggcgatcggcgcgcgcgacatcgcgcaggcgcggcgcgtggtcggcaccagcgccaccttcttcatcggcctgtcggtaatcatcgccatcgccggctggttcatggcccatccgctgctggcggcgatgggcacgccggccgcctcgctgccgctggccgaggcctacctgcagatcatcttcctggcgatgccgacgctgtatgcgttcgccttcctcaccgccgcgctgcgcggtgccggtgactcgcgcacgccgttccgtttcctgatggtctcggtggcactggacatcgtgctgaacccggtactgatcttcggcatgggcccgtttccggcgctgggcattgccggctcggcctgggccacgctggtcgcgcagacgctgtcgctggccggcctgctgctgtacatgcggcacaagcgccacacgctgtggctgggccgtgccgacatgcgcctgttcaagctcgacctggccatcctcaaggcgctggtggtcaagggcgtaccgatgggcctgcagatggtgctgatctcgctgtcggtgatcctgctgatgaccatggtcaaccagtacggtaccgacaccggcgcgggctacggcgccgcgctgcagctgtggaactacctgcagatgccggcgatggcgatcggcgccgcgtgctcgtcgatggccgcgcagaacgtcggtgcgcagcgctgggaccgcgtgcgcggtaccgcgcgccagggcgtgctgttcaatttcctgctgaccggcgcgctgatcctgccgctggtggtgttcgatcgccagctgctggccctgttcctgccgccggccagccaggcgctggacatcgcccgccacctcaaccacgtggtgatcggctcgttcctgttcttcggcgtcagcttcgtgatctccggcgtggtgcgctccaccggcgcggtgattccgccgctgctgatcctggccggttcgctgtggggcgtgcgcgtgccgttcgccgagctgctgcagccgtactggggcgccgatgcgatctggtggagcttcccggtcagttcgctggtgtcgatgctgctgtcgctggcgtattaccgctggggtggctggcgcaaggcgaagatgatgggcaagccttcgcacgccgaagaactggccacgccgtcggaaattccggcctgcccaccgtcaccggtggccgacccggatgccactccgccgcgctga

SEQ ID NO: 536215 - DNA, 240 bp, Stenotrophomonas maltophilia
atgcatcaacgactgcagatgaagcggagcgcggcgctggccttgatcggcgccgcactggccgcatgttcgacaggtgaccggctgggcgatacccaggtgcggccaaccgaccgccccgagtgcctggtcggcagccagcgccaggatctttccgccggcgtacccaccctgatcgggggcagcggctgccgcaccgatcccgacaacccgcgtcccctgaacaagcgaacggagtag

SEQ ID NO: 536216 - DNA, 408 bp, Stenotrophomonas maltophilia
atgaccgagctttccccgctgtcgcccagtgtccgcctggacatctggttgtgggcggcccgcttcttcaagacccgcagcctggccaagcaggccatcgaaaccggcaaggtcagcgtcgcgggccagcgtccgaaatcctcgcgcgcggtgcgtgtgggtgagcagctgcaggtggatcgcggcgaggagcatttcgagatccgggtgctcggcctgagcgaccagcgcgggcccgcaccggcggcgcagcagctgtatgccgagagcgaggcctccaaggcccgtcgtgccgaacagcgtgcgctgcgcatcgccgcacgcgatgggttccaaccgccagagcacaaaccggacaagcgcgcgcggcggttgatccgcgcgttgggcgatatcgacgcgctctga

SEQ ID NO: 536217 - DNA, 1188 bp, Stenotrophomonas maltophilia
atgcatcgaatgctgttatgcctgtccctgcttgccgccgcgccattgcacgcggccgacatcacgttctgggacactccgcagcgcgggggcaacagcatgaacatgtcgcctccggaccggagctacttcgaggccctgcgcgcgaccggtgcgacctgggtacggctggtaccggacaagtggaaggggcagggcgggcgtgacttcctgattggcaacgccgacgactaccgtagcctggttccggccgacctggccacgctgcggcgggtgctggatgatgccgacgcggctgggctgaaagtggtgctgactcctttgtcgttgccgttgctgcgctggaagcagcacaacggcgacaaggtcgatccgcgcctgtggcagtccttcgacaatcacgcgccggcccggcgcttctggagcgacctcgccacggcattgaagggccatcccgcactggccgcctacaacctgatcaacgagccggttcccgagtatggtgctggcctggccgagcatgcctcggccgcggccatgcagcagtggtacgccggtgtggaagacggtccacgcgatctgcgccgcttctattcggaactgatcgccagcatccgtgcggtcgatgcggacatgccgttgatgctggatgccggctggtacgccgctgccgacggtttcaactactggccggcgccgctggcagattcgaaactgctgtacagcgtgcacatgtatgagccgtatgccgcaaccagcgcgcctaaccagaagcgcaccacgccgtatcgctacccaggcgtggtgccgtttggcgaacacagcgaacgctgggatgccgcgcgggtccgcagttacctgcagcagccgatggactgggcgaagacgcacggcgtgagggccaaccgcatggtggtcggcgaattcggctgcatgcggcgctggcccgactgcggccgctacctgcaggacgtgctgcaggtgctggagcaggacaaggtgcactgggccttctacgcgttccgcgaggatggctgggatggcatggactacgagctgggcgacagtccgctgccgtggtcgtactggcaggcgcaggagaaggggaagaccgtggcgccgccgcgttcgatgaaggcaccggtgtttgcgccgatcctggagcggttgaaggcgggcaaccggtaa

SEQ ID NO: 536218 - DNA, 603 bp, Stenotrophomonas maltophilia
atgagcctgaccgatgaacttctcgccaagttgcagggcgccccgctgcagcaggtgtcgcagcagctcggcatcagcgatacccaggcttccggcgcgatcagtgccgcgctgccggtgctgatgggcgcgctgggcaacaacgcctcgcagccgcagggcgcgcaggcactgctcggcgccttgcagaacaaccacagtggcctggacctgggcagcgtgctcggctcggtgctgggtggcggcggcggcggtgccgccagcgatggcgccggcatcctcggccacatcttcggcggcagccagcagaaggtggaaaccggcctggcccaggccacccagctcgacagcggccgcaccagccagctgctgcagatcctcgcgccgatcgtgatggccttccttgcccagcgcctcggtggcggccaggccgatgccggctcgctcagccaggccctgggccaggaaaagcagcaggtgcagcaacagggcggtcttgccggtggtctgctcggcagcctgctggaccaggacggtgacggccagctcggcgtgggcgatctgctcaagatcggcggcagcctgctgggtggcaagcgctga

SEQ ID NO: 536219 - DNA, 1644 bp, Stenotrophomonas maltophilia
atgagccagtccgataacaacagccccaaatgcccgtatcacaccgcgccgtcgcctgcggaaggcgcccagcagcagcgcgagctgagcaccacgccgaaacagaagcagggcgatgatccggtgaccccgatgaccacggccttcggcgcgccggtggtggacaaccagaacagcaagaccgccggcccacgcggcccgctgctgatggaagacgtctggctgctggaaaagctggccaacctcaaccgcgagatcattcccgagcgtcgcatgcacgccaagggctcgggcgcgttcggtaccttcaccgtcacccaagacatcagcaagtacacccgcgccaagctgttcgagaaggtcggcaagcagaccgagatgttcgcccgcttcaccacggtggccggcgagcgtggcgccgccgatgccgagcgtgacatccgcggcttcgcgctgaagttctacaccgaagaaggcaactgggacctggtcggcaacaacacgccggtgttcttcctgcgcgacccgcgcaagttcgccgacctcaacaaggccgtgaagcgcgacccgcacaccaacctgcgcagcgcgcgcaacaactgggatttctggacgctactgcccgaagccctgctgcaggtgaccgtggtgatgagcgatcgcggcattccgcgcagcttccgccacatgcacggtttcggctcgcacacctacagcttcaccaatgccgacagcgaacgcttctgggtgaagttccacttcgtcagccagcagggcatcgaatcgctgaccgacgcgcaggcgcagatcctggtcggccatgaccgcgaaagccacggccgcgacctgttcgccgcgatcgagaagggtgacttcccgaagtggaagctgttcatccaggtcatgccggagttggaggcggaaacctaccgcgtgcatccgttcgacctgaccaaggtgtggccgaagagcgactacccgctgatcgaagtgggccagttcgaactgaaccgcaacccggtcaactggtaccaggacgtggagcagtcggcattcgcaccgagcaacctggtgccgggcatcggcccgtcgccggacaagatgctgcaggcgcgcctgtttgcctactccgatgcgcagcgctaccgcctgggcgtgaaccaccaccagattccggtgaacgccgcacgctgcccggtgcacagcaaccaccgcgacggtgcgatgcgcgtggacggcaactacggcggcctgccgcactacgagccgaacagctacggccagtggcaggaacagccgcagtaccgcgagccgccgatgaagatccgcggcgacgccgacttctggaacttccgtgaggacgacgccgactacttcagccagcccggtgcgctgttccgtagctacaaccaggcacagaaggaccgcctgttcgccaacaccgcccgtgccctgggcgatgcgccggacttcatcaagcagcgccacatcgacaactgcagcaaggccgacccggcctacggtgctggtgtggccgcggcgctgaaggcgctggccagccagccgtcggatccgttcaagccggcccagccggaagcggacttccccaccgccaccccgggcgccgaagacatcgagctctga

SEQ ID NO: 536220 - DNA, 2616 bp, Stenotrophomonas maltophilia
gtgactgatacaaaagacaacaccagcaacgccaaggcgtccaaggaccacaccccgctgatgaagcagttcttcgcggccaagtccgattacccggacctgctgctgttcttccgcatgggtgacttctacgaactgttctatgacgacgcccgcaaggcggcgcgcctgctcgacatcaccctgacccagcgcggcagctccgggggcgcaccgatcccgatggccggcgtgccggtacatgcctatgaaggctacctggcgcggctggtggcactgggcgagtcggtggcgatctgcgaacagatcggcgacccggcgctggccaagggcctggtcgagcgcaaggtagtgcgcatcgtcacccccggcacggtcaccgacgaggcgctgctggatgaacgccgcgacaccctgctgatggccctgtcgcgcagcaagcagggctacggcctggcgtgggccgacctggctggcggccgcttcctggtcaacgaagtggaaaccgacgacgccctggaagccgagctggcacggctggagccggccgagctgctggtgcccgacgaagaaaactggccggagttcctgcgccagcgcaccggcgtgcgtcgccgcgcgccgtggctgttcgatgccgacagtggccgccgccagctgctgaacttcttcaaactgcacgacctgagcggcttcggcatcgatgacaagccgcgcgcgaccgctgccgccggcgccctgctcggttatgtcgaggaaacccagaagcagcgcctgccgcacctgacctccatcgcgatggagactgccggcgaggcgatcgcgatgaacgccgccacccgccgccatctggaactggatacgcgtgttgatggcgacacccgcaatacgctgctgggcgtgctcgacagcacggtgacgccgatgggcggccgcctgctgcggcgctggctgcatcgtccgctgcgcctgcgcgaggtgctggtacagcgccaccatgcggtgaaaaccctgatcgatcgcggcagcgacgctgacatccgcgagcagttccgccgccttggcgacctggaacgcatcctcacccgcgtggcgctgcgctcagcgcgcccgcgcgatttctccaccctgcgcgacggcctgggcctgctgccggcggtgcgcgacgtgttggccccgctggactcaccacgcctgcaggccctgcatgcggcgctgggcgagcacgacgagtgcgcgcagctgctggccagcgccatcgccgagatgccgccgctgaagttgagcgacggcggcgtgctggccgatggcttcgatgaagagctggacgaactgcgccgcctgtccacccacgccgaccagttcctggtcgacctggaacagcgcgagcgcgaaagcagcggcattgccaccctgaaggtgggctacaaccgtgtgcatggctactacatcgaaatcagcaagggccagtccgaccgcgcgccggtgcactacacccgccgccagacgctgaccaatgccgagcgctacatcaccgaagaactgaaggcgttcgaggacaaggtgctgtccgcgcgcgaccgttcgctgtcgcgcgagaagtacctgtacgagcagctgctggataccctcggcgggcagctggagccgctgaagcagtgcgccgccgcactcagcgaactggacgtgctggccgccttcgccgaacgcgcgcaggcgctggactgggcccggccggaactgcaggccgagccgtgcctgaagatcgaacgcggccgccacccggtggtcgaggcggtacgcgagcagccgttcgaaccgaacgacctggacctgcatccggaccgccggatgctggtcatcaccggcccgaacatgggcggtaaatcgacctacatgcggcagaacgcgctgatcgtgctgctggcccacatcggcagcttcgtgccggccagccgcgcattgatcggcccgatcgaccgcatcctgacccgcatcggcgccggcgatgacctggcccgcgggcagtccaccttcatggtcgaaatggccgagaccagctacatcctgcaccacgccaccgcgcattcgctggtgctgatggatgagatcggccgcggcacgtccacctacgatggcctggcgctggccgacgcggtggcccgccacctggcttaccagaaccgctgctacacgctgttcgccacccactacttcgagctgaccgcgctggccgatgagcagcacgaaggcggccgcagcggtattgccaatgtgcacctggacgcggtcgagcatggtgaggcgctggtgttcatgcacgcggtgaaggacggcccggccaaccgcagcttcggcctgcaggtggcggccctggcaggcctgccgcgcgccaccgtagcgcaggcgcgccgtcgcctggccgagctggaacagcgcggtggtgaaagccatgccgccgagctggcaccacaggcattggatgcaccgcagcagttcggcctgttcgcggcgccatcgaacaaggcacaggaagcactggccgccatcgatccggacgaactgacgccgaagcaggcgctggaagcgttgtatcgcttgaaagcgctgctgtag

SEQ ID NO: 536221 - DNA, 1278 bp, Stenotrophomonas maltophilia
atgactgcagcctgcatggccgccgaacctcgttacacctggcgtaccgtcctgctgagcatcctggtcgccatcgttccgcttgccggctccgcaccctataccttgctgaaggcggtgctgctgctggccctgctggtcaccggcgtggttctgatccgccgccagcccgatgtccgcctgcgctaccgcatcgcccggttcatcgtgatcgtctgcttcctgcgcctggcctatgccttctacagcatcctctggcacgggctgcgctggaacgaactggaccttcctgcacagacactgctctacctgggcaccgctgcggtgttcgccactgcgctggactggcgcctgatctggaagatctttgccctgtccaccctggtcttcggcgggtcgtgcatcgtgcagcaccacgtgatgggccttgaacgcgcgcacggtttcagtggcggcgaatggacggccatcgagttcaccatggtgacgctgtgcatggcgctgttctcggtcatccggttgatccagcccaatgtccatccggccgaacgctggctgcacggcgtggccatcgccgtcggcgtctatggttcgatcctggcgcagagccgcgggccgatcctggcgttcattcccgccatgctgatggtgattgcggtgcacgtccggcgcacccggcgctggcggggggcactggccttcgtcggtgccctggtcattggcgtggtcggcgccacctcggtgctgaaccatgaggtgatccagcgcttcggtgaggtcagtggcgagatctccggtttcaaccaggaaaacgaggtcggctcggtccgcgagcgcatcgccatgtggggtgtggcggtcgacgccttcgccgagcatcccgtggcgggggtgggcctgaaccagttcggtacctatgcacgtgagggcatcgcccgcggcgaggtgtccgagtcgatcttccgctacaaccacccacacaacgagtacctggaagcggcggtgaccggtggcgtgccgttgctgctgatcatgctgctggtcttcatcctgcccggcatccatttcgtgcgacgtctcggccacgccgacgacatcaccgcgatgatcgccaccgccggacttgccgtggtcatcgtctatgcgctttcggcgttcacggacaacgtgttctaccgggcgatgccgcattcgttctatttctacctggtgctgggtttcatgctggcgaccgccttgccggcgcgtgacctgctccggccagggagtccttcctga

SEQ ID NO: 536222 - DNA, 993 bp, Stenotrophomonas maltophilia
atggcgcatatccatctgctggccgccgacaaccagcgtggcctgtcccatgacatccaggtgatcgagcgctcgttgcagcagctcgggcacacggtgacggtcagccgcctggacgcggtgcgcaatggtggcgcctggaaactccgcggaatgcgcctgcgcaggctgctggcctcgtggctgagcctggggcgcacgccggcccggttcgacgtcaacatctcgctggaacatgtccggccggcgagcttcggactggccaacgtcaatctgttgatcccgaatccggaatgggtgtccgcacgcagcctgcggatcctgccgcggttcgatgcgttgctgaccaagaccgaagaagccacgcgcatcttcaacgcgctgggcatgcgcgcgctggaagtcggtttctgcagccgtgaccgctacgacccggcagtgccgcgcaggccgcgcagcttcctgcatgcggccggtaccagccgtatgaagggaacggctgcactcgtcaatgtctggaaacggcaccccgaatggcccttactgaccatcctgcgcggcggcccttcggacgaagatgagggcggtgccgcgaacctgagaatcgtccgcgagcggctgcccgaccaggaggtgcagcgcctgcagaacgaacatgcgttccacctgtgcctgtcgcagaccgaaggctggggccactatctggtggaagcgatgagctgcggggcggtggtgatcacctgtgacggcgcgccgatgaatcagatgatcgacgacagccgcggcatcctggttgccgcgcacgagggcgagccctgccatctgtccaggacctggcatgtggatgagaaggcgctggaacaggccgtcgagcgcgcgctggcgatggatgaggccgagtggacccggctgggcgccaatgcacgcgcatggcacctggccagcgaggtggcgttcccgcgccgtctgggcgatgccctggccaagctctga

SEQ ID NO: 536223 - DNA, 393 bp, Stenotrophomonas maltophilia
atgacacggatcctgcacatcgaaggcgcgtccatcaacgacatcgccagcctctacgtggaaatcaatcgcgtgttcatggccgacgaagactggcaactgggcgcaagcctggatgcgcttgatgacctgcttcacggcggctacggcgctctcgcaggccatgccatcgccacggtggtgtggcgtgacatcgcccacagccgcgatgcactgggccgcgagaccacgcgcgcctggctgcagtcgaaactcgctcagggcggcaggttcaacggtgcggccatccacgctcagttgacggcactggcgtttggccagggacagacctacttcgagatcgtcatggagatcttcggcagccatccgcagatcaccctggtgcctggctga

SEQ ID NO: 536224 - DNA, 2430 bp, Stenotrophomonas maltophilia
atgattatggtgttaaatctgcgtgattttcatcgggcgctggtgtgtcagcggtattcgataatgatatggcgccattatccgccgccttgttttctgactgcctgcacagttccatatatttggatcggtccatatataaagtcccgtaaagtttcccttcgctgcgccgccatcgaacgtacggccacgatcaagggaattgagatgcttgccttacgtaatctccgtgtgggatcccggcttggcgccggcttcggtctgctgctgctgttcatcatggccatcgttggcctggtgctgtatgggaatcagctgaaatccgcccagttcgagaaagtggtggacgtcaacatggtcaagatgcgtttgttgaatgacatgcttgataccaacaacgcggtgctgatgcatcgccgcctgatggtgatcaagcggggtgatgagttcgacagggattaccagcgtgcccaggagttgtcgcggacctatgacggtatctgggccaagtacatcaagattccgcgtgacgccaccggcgataccctggtcgcgcgcatcgaggcggcacgaaaggccaccgatgcatcaacccagcaactgcatgagcgcatgaaggtgggggattttgatggggcagcgaaggagctgctggccgagcacggtctggcaacggcctggaatgaatccatctcggccctgctgcgccaccaggaaacactgaccgaacgcagccgcgaagagtaccgcgcaaccgaatcgtggaccggcacgctgtcgatcgcgttcggggcactgagcctgctgctgggcacgttggcggcctgggcgatcacccgcagcctgacccgtccgctggaaggcgcggtgaagctggccgacggcatcgccagtggccgcctggacagcagcatcgacgccaccggcaacgacgaggtgacccagctgctgaagtcgatgcagcgcatgcaggcacagctgcagtcggtgatggcggcgcagggcgagctggcacgccagcacgatgccggcagtctcagctaccgcatggacgagagcgcattccccggcgactacgggcgcatggtgcatgagaccaatgcgctggttggatcgcacgtgcaggtacagaaccggctgatcgaggtgatgaagcactacgcacgcggcgatctgtcggtggacatggacccgctgcccggcgagaaggcggcgatcacccaggcgatggacgaaaccaagtccagcctgtcggcgatcaacagcgagatccgccggctggcgacggcggccgcggcaggcgacttcagcctgcgcggtgatgaagatcgcttcgcctacgatttccgcgacatggtggcagggctcaatcgcctgatgcagaccaccgacgagaacttggtgcaggtctcgaccctgctgcaggccatctcgcgcggcgacctgaccgtgcgcatgcagggggatttccacggcgtgttcgcgcgcatgcgtgatgactgcaacgccaccgtcgatcagctcaagcagatcgtgggccgtatccaggccagtgcttccagcatcaacctggcagcgggcgagatcgcctcgggcaacaccgacctgtcgcggcgtaccgaacagcaggcggcgaacctggaagaaacggcagcgtcgatggaggaactgacctctaccgtgaagcagaacgccgagcacgcacgccaggccaaccagctggccatcggcgcgcatggtgttgcctcgcagggcggtgaagtggtcgggcaggtggtcaccacgatgtcggccatcgaagccgcgtcgaagaagatcgccgagatcatctcggtcatcgatggcatcgccttccagaccaatatcctcgcgctgaacgcggcggtcgaagctgcgcgtgccggggaacagggcaggggctttgccgtggtggccagcgaagtgcgtacgctggcgcagcgctcggcgggcgcggccaaggagatcaagggcctgatcgaggattcggtcggcaaggtcgccgatggctcggcgctggtccgccaggccggcaccacgatgggcgagatcgtggcctcggtgcagcgcgtgaccgacatcatggccgatatctctgctgcctcccaggagcagagctcgggcatcgaacaggtcaaccaggcggtggtgcagatggatgagaccacccagcagaatgccgcgctggtcgaagaagccagtgccgcagcgcgctcgatggaggagcaggcgaacctgctggccgaagccgtgtcggttttccgcacgggggcggtgaccgccgccgccgcagtacgcccggcgctggcagccgtggcggcatcggttgcgccggtacgccggcctgcggtgctgtcgccgcggcttgagccgacgctggccgccaatgcgggtggttgggaagagttctag

SEQ ID NO: 536225 - DNA, 363 bp, Stenotrophomonas maltophilia
atgaagacctcgacccgattgcttgtgctgggcaccctgctggcggcttcgtcggtggccggcgcgcagacctatgggccgcgcgatgagggacgcaagttcaatgacggcagccgcgtggtctgcaagaacgtggaagtgcagcgtaattcgcgcgatcccaaccgcatcgccggtaccgccactggcgccgtgattggtggcctgctgggcaaccaggtgggcggtggcaacggcaagaagctggccaccgtggccggtgccgtggccggtggtgcggccggccgccagatccagggcaacagccagcagaagaacggcgaccgcgtggtcgaacgccgctgcgagcgcgtttaccgctga

SEQ ID NO: 536226 - DNA, 1377 bp, Stenotrophomonas maltophilia
gtgaacgaattgcccgtcgcagagtcgcacgtgccggttgccgaccgcgagcccggacccgaggcgagcacccgcttcggtcggctgcgcgagcgtaccgatgagttggaactgttcatttccggcctgctggcgttcgcactgttggcggtgcctgggtacctgttcgatgcgtgggcgcgcagcagcctgcacacggaaggcatgtacttccaggtgctgtggtttggtttcagcatcagcgtgggcatgtgttacgtgctggcggtagcgctgatcgcgcacctgaccgtgcgcgggtactggataggcctgatcgggctgaaatcgcactttcccaagggcatcgactgggaacggctgccgcagatgggcccggtatcgcgcgctttcctcaaggcgcgcgacggtggcctggacggcagcatcgaacgcgctgatcgtttggccaccatgctcttctccaccacgctgctggcagtacaaacgctggccggcaccctggtgatggccgtgctgacgttgtgcgtggcgatggcgatcagtgcgcttgccggcggttccgatcgtgtggccatgatcgtggtcggtaccgtgctggccagcctgcttgtactcgcactggttcctgcactgctggagcgtgtcattgcgcgccggcagcggcgcgaccagccctatgacggcctgcagcggtggctgcagcgcttcctggcgggcctgcaacggattcccctgctgcgcctgatgcagaccatgcagttgaccctgcagagcaacctgcgctcgcgttcgttcatggcggtctatctgctggcggtgatggtggccatggtgctgggcggggtgcaggtgctgggttcggtgaagttctcgctgttcaaccgctaccaggtgatgaccgacgaggccgtcgaacacggcatgttgagcgcgcattacgaatcgatgcgttcggcgcacgatcagctgctgccgtacccgatgatcccgtcggacactatcagtggttcacgcctgcgtgtgttcattccacaccgcccccagcgcgacaacccgctggcgcgccagcactgcaccgccttgcccgccgcacgcaatgaagcgactggcgcaaaggctgccagcgcagcggtggagtgcctgtcccggttgtggcgggtgcagctggatggcacgccggttgacctgcacgacttcatgccgatggagcgccgcgatctcgacatgcgtggcctggtgggctatctgcccatggcgacgctggcaccgggtcgccatgacctgagcctggtctggaatgccgaagggggcgagcgcggcccggagcgacgccgcgagtaccgcatcccgttctggtacgcgcccgacccctga

SEQ ID NO: 536227 - DNA, 1128 bp, Stenotrophomonas maltophilia
atgagcgcactctggcgcagcctccggcagacgctgatggcagtgctgtgcgaccgctacgcgatcgtggtgatggtcggcgcggtgatcctgtactcgttcttctacccggccgcgtaccgccaccaggtggccggcaacctgccggtgctggtggtggacgaagaccacagcgcgaccagccgcgcgctgctgcgaaagctcgatgcactccgcgttgcacgcgtggtcgggcaaccggcagacatcgacagtgcacgccagcagctggaagccggccacgccgagggcatcgtactgatcccggccaacctggaacgcgacatcctgcgcggccatccggccaagctggtgttgctcggcaacggcgcctacctgggccgtgccagctgggtgctgggcagcgtggccgatgcactgggcgcgttcgggcgtgaggcggtagtcggccaggcggccttcatgggcgcaccgcaggcaccgccggtcaccctggtgcagcgcccgctgtacaacacgcaggaaggctatggcagcgccatcgtgcccggcgtggccgagctgatcgttcaccagaccctgttgatgggcatcggcgtgctgctcggtggccgccgactcgcgctgggccggcgcctgcgcttcgacctgccaacgctggcgggcatggcattgggcttcagcctgatcggcctgttcggtctgttctggtacgccggcttcaccgcgtgggtgcaggactatccgcgcggtggcaatccactgggccagttattgggcggcacgctgttcatcgccgccacggtggcgttcggcctgttcgtcggcagcttcttccgcacccgcgaacgcgccttccagtacatcatcgccacctcgatcccactgttcttcctggccaacctgtcgtggccggcggtgatgacgccgcaaccgctggtctggctggcgcagctgctgccgaccacctcgggcatcaacctgatggtgcgcctgaaccagatggacgcccgcctggctgaagtcggccacgaactgatcactctcaccgtcctgctgctgctctacggcagcctcgccgcctggcgcctcctcgaaaaaaaggggacgaaggggattgagtcgtaa

SEQ ID NO: 536228 - DNA, 1188 bp, Stenotrophomonas maltophilia
atggccccagcactgagccccgaccgcaacggcttcgccgcttcgtggcggcgcgagctgcagtcgctgcgcggcaaccgtgccgacctgctgctggtgaccctgctgcccctgctgatgctggcggtgatggcgtggatgttcacgccgtcggtgatgcgcgatatccccattgctgtggtcgacctcgaccacagcagtgacagccgcctgctgctgcgcatgctcgatgccagccccggcgtgcgcatcgccagccagcccgtggacatggaagacgcccgttcgcagctgcgccgcctggatgtgttcgccatcgtactggtgccgcgtgatgtcacccgacaggcgttgcgtggacggcagggcacggtgttcgcctattacaacgccacctacatgaccactggccagtcggcggcgcgcgatatcggcgacgccgtctcggcctggaacgcgcgcctgctgcgcgagcacatcggcctgcaggtcggcccgggcaagctgcgtgcggcgccgatcgcggtgcagtcggacatcctgtacaacccggcacgcagctacgaactgttcctgctgccactgatcttcccggcggtgctgtcgctggtactggcgctggccgtagccggcagccttggccgcgagatccgcgacggcaccctgcccgcctggctgggtcgcatgccgtggtcggcgattgccggcaaggtcgcgccgtacatcctgctgttctcgttgtatggcgcgctcggcattgggtacctggcctggatgcgcggcgatggcgtggccggcagcgtgctcgtgctcctgctcgcacagccactgttctgcttggccacggccgcctacgcgttgttcttcgtcggcgtcacccgcgacatgggtaccgcgctgtccgcggtcggcctcagcatcggcaccgcactggcgttctccagcgccaccttcccggtgctggatggccccctgttcacccgtatctggcatcagttgctgccactcagcgcctacatcaagctgcagacccagcagcagttcatcggttcgccgctgcaggtttcgatatggccgctgaccacgctgttgttgatgacgatggtggccggtggcatcggcggcctgcgcctgatcgcctttgcgcgtacgcctgaagccgcgcagcctgcgggagccgacgcatga

SEQ ID NO: 536229 - DNA, 1014 bp, Stenotrophomonas maltophilia
atgagtgatgtgctgcacgacgaagcgaaaacgccccccggcaagcgccgcttgggcccgatcctgatagtggtgctgctgatcgtggtggtgctcggcctgtggctggcctggcgcagcccggccgaccagatccagggcatggccgatgcggacacgatcaacgtggccgccaagatcaccgcgcgcgtggccgaactgaaggtgcgcgagggcgaccgcgtacagcccggccaggtgctgttcctgctcaacagccccgaagtggccgccaaggaacagcaggcgcacggcgcattggccgccgcgcaggcggtggccgacaaggccgacgaaggcgcgcgcagcgaggacatccgcgccgccgaagcgaactggaagcgcgccgaagccggtgcgacgctggccgaggccacctaccagcgcgtgcagaacctgttcaacgaaggggtgatgacccggcagaagcgcgatgaagcgcatgcccaggccaccagttcgcgcgaactggcccgtgctgcccgcgcgcagtacgacatggcgttggccggcgcgcgcgagcaggacaagcgcgccgcgcagggccaggtgcagcaggcacagggcgcggtggccgaagtcaacgccgcgcgtgtcgaagtcgaagggcgcgcgccggtggccggcgagatcaacaagcgcatggccgaccccggcgaactggtgccggccggctacccggtgttcaccctggtcgacatcgaccgcatgtgggtggcgatgaacctgcgcgaatcgcagatgcagggtctgaaggtcggcagcaagctgaagggcaacgtgccggcactcggccaggacggtgagttcgaggtctacttcatcaacccggccggcgactatgcaacctggcgcaccacccgtcagtcgtccggctacgacgtccgcagcttcgaggtgcgggtgcgcccggtacgccgcatcgagggcttccgccccggcatgagcgtgctgttcgcatggccccagcactga

SEQ ID NO: 536230 - DNA, 1407 bp, Stenotrophomonas maltophilia
atgggcgtgatcggccgacgtacaaggatgcaccgcgcgaagcccgcgatggcgctggcgctggcgacctgcctgccattcgctgcgtccgcgcagaacaacaccgacgcacctgcattggactgggaacaggcgcggcaacgcctggagcaggtctccgatgcactggcggccgctgacgcagcggtacgcaacaagcaggacctgcaggacgcgacccgcctgctgcgcctgccggagatcaccggcgaagtgcgccgcctgcagttccagaagaccctcaccctgccactgggctcgctggcccccgtggctgaagccttcggcatcgattcgccgctgtcgttcaccgagcgcgactggagaacgcgaccggtggtgacggctgtgctgccgctgtacaccggcggcgtgattccggccgcgcaacgtgccgccagcgccgcccacgaacaggccagcgccgagcgcgaagcacagcgccagtcgctgaccgtgcagctggcccaggcctatttcggccagcgtctggccgagcaggcggtggacgtacgccgcgacgtgcgcgatggcctcaaccaacatctgtccgatgcggagaagctggagcgcgagggcttcgccacccgcgcgcagcgcctgcaggccaccgtggcccgcgacaaggccgagcgtgagtaccagaagacggtgaacgatctggccacgttgaaggctgcgctggccacgctgctgcgcagtggtggcgaagtacagcccgtatcgccgttgttcgtgcagcgcgtaccgctggagccggtggccagcttcgagcgcaccgcgcaggcgcgccagccgcagatcgcacgcctgcgggcgatggtggcgcaggccgaacagggcgtgcgcgtgcagcaggccaagctgaagccgcagatcttcgccttcggccagtacgacttccgccgccgcgacgagatgctgaccgatccggactgggcgttcggcatcggcctgaagtacaccttcctgtcgccgaactcgcggccggcgcagatcagtgccgcacgtgcgcagcaggagcaggccgaagccggcctgcgcgaggccgaaaaccaggtcgcactgggcgtgcgcaaggcctggaacgaactggaaaccgcgcggcagcagttcgtactgctcgacagcagcatcgcccaggcacaggaaaacctgcgcctgcaggagctggcgttccgcgaaggccaggcgacttcgcttgatgtaatcgacgcgcggctcggcctgggcggtgcccgtgtcgagcgtgcgcaggccgcctaccaatacgatattgcgctggcacagttgctggaggtcagtggacagatggaccgtttcgaagagttccggcggcgtgcggacgaggtgatcgaccatgagtga

SEQ ID NO: 536231 - DNA, 894 bp, Stenotrophomonas maltophilia
atggatctggtacatccacaactggccgcgttcgctgccgtgctggaggaaggcagcttcgaggccgccgcacgccgcctgtcgatcagcccgtcggcgctgtcgcagcggatcaaggcactggaggaccggctcgggcaggtgctgctggtacgccaggcgccgtgccgccccaccgccgccggtgaggcgctgctgcgccgggtacggccgatgcaggcgctggaagccgaagcattggccgagctgctccccgaacgtggccgtgacgccgtgcgtacgccgatcccgctggcggtcaatgatgattcgctcgatacgtggttcgtgccggccatcgccgacctgcaccagcgccatggctacctgttcgacctgcgcatggacgaccaggaccacaccctgcagctgctgcgcgacggcagcgtgctgggtgcggtcaccgccgaaagccagccggtgaagggctgcaacgtgcatccgctgggtgccatgcgctaccacgccatcgcctcaccgggcttcgcccgccagtacttcagcgacggcatgcaggccgcagccctggcgcgcgcaccgatgctggtattcaaccgcaaggatgaactgcaatggcgcttcgtgcgacggctgacccgcgcgcggctgcagccgccgctacactacctgccctcctccaccggtttcgtcgaagccgccgcgtgcggactcggctggggcatggccccggaaaccctggtcgcgcccgccgtgcacgccggccgcgtggtggtaatggaaccccgccgctggctcgatgtgccgctgtactggcagcatgccgccgtacgctcaagcacgctgcagcacatcacccaggcgctgcgcactgcggccagcggcacccttcgttga

SEQ ID NO: 536232 - DNA, 615 bp, Stenotrophomonas maltophilia
atgtggatcaccgctaccgtcgccggcctgttcgcgggcgccggcctgatcatcgccatcggcgcacagaatgccttcgtgctgcgccagggcttgcagcaacgtcatgtgggaacggtggtggccgcctgcgccggcgcggacatcgcgctgatcctggcgggcgtgggcggcatgggcgcgctggtgctgcagtggccgttgctgctgcaggtgctgcgcttcggtggtgcagcgttcctgctctggtatggcctgcaggccgggctgcgcgcgtggcgcggtggcagtgcgctggcggcgggcgaggtggagggtggcaatcgacggcaggtgctgctgacctgcctggcgttcaccctgctcaatccgcacgtctacctggataccgtggtgctgctgggcagcctgtccacgcgctatccgggcgatctgcgctgggcgtttgctgccggcgcctgcgcagccagcgtgatctggttctgtgcgctgggctatggcgcgcggctgctgcagccggtgttccgcaggccgagtgcctggcgggtgctggatgctggcgtggcagtgttcatgttctgcctcgccacgctgctgctgttgcgcccgctctag

SEQ ID NO: 536233 - DNA, 789 bp, Stenotrophomonas maltophilia
atgggcatcatcaagcgccccgacgagatcgcgctgatggccgaatcgggtcgcctgctggcgcaggtgttcgccgcactcgaccagctgccgctgcagggccgcagcacgatggagatcaacgagttcgtcgagcgcatgatcgtcgatgagttgcaggcgcggccggccagcaaagggcagtacggcttcccgtacgtgctcaacacctcgatcgacgacgtcatctgccacggcgttcccagcaccaccgacgtgctgcgcaacggccagatcgtcaacctcggcatcaccctggagaagaacggctacatcgccgactccagcaccacctacctggtcggtgaggtcgactacgccgcgcgcaggctggtgcagaccgcctaccaggcgatgtggaaaggcatcgccgcggtgcgccccggcgcacgcctgggcgacatcggccacgccatcgcccgccacgcgcgcagccacggctacagcgtagtgaaggaatactgcggccatggcatcggccaggaaatgcacgaggaaccgcagatcctgcactacggccatccccacaccggcatggtgctggaagaaggcatggtgttcaccatcgagccgatgctcaaccagggcaagccggccatccgccagcagccggacgcatggccggtctacacccgcgacggcaagctgtcggcgcagttcgaacacaccgtggcggttacccgcagcggcgtgcgcgtgctgaccctgcgccccggcgaaaccccgcagtgcgcggtggacgtggcctag

SEQ ID NO: 536234 - DNA, 213 bp, Stenotrophomonas maltophilia
atgggcatcgtcaacatcgatgacaccctgcacgaccagctgcgccgtgcctgcaccgtctccagccgttcgatcaacgcccaggccaacttctggatccgggtcggcatgctgtgcgagctgaaccctacgctgagtttccaggacatcgtcgccagcgagctgcgcgcggccggcgtgcagccaccgttgctgcccccgggccaggtctga

SEQ ID NO: 536235 - DNA, 360 bp, Stenotrophomonas maltophilia
atgccccagaccgtcatcccgcaactgcgcatgcgccatgccgacactaccctgccgttctacgtgcaggggctgggtttcgtggtcgactgggaacatcgcttcgaacccggcttcccgctgttcgcccagctcacccgcgacggccagacgatcttcctcaccgaacacagcggcgactgcgaggtcggcggcgcggtgtacttcatcgtcgacgatgttgacagcctgcaccgcgccttcagcgcggccaacgtgccgatcgagcagcccccgcatgacaccgaatggggcagccgcgaaatgctgctgcgcgacccggacgacaaccggttgcgcttcgccacacgcgtggactga

SEQ ID NO: 536236 - DNA, 885 bp, Stenotrophomonas maltophilia
atgctggtgcgttccccgctgatcctggacctggacggtggcgtattgccgctgcaacaggcgcagaccctggccctgccgcagtggcacgatccactgcgcttcgcctgcagcaatgccaccctggaccgtttcgccgccgaagtgctggcaccgctgcccgcgctgctcggcacagtgatgctcggcagtggtgacttccatcacctcagcctgccgctgctgcgccgcatgcgcgcgcaggcgccgttccagctggtggtgctggacaaccatccggacaacatgcgattcccgttcggcatgcattgcgggtcgtgggtcaacgccgccagcaagctgccgcaaatctcgcacatccatgtactcggcatcacctccagcgacatcggcctcggccatgcctgggagaaccactggcgcccgctgctgggcgggcgcctgacgtactggtgcatggacgtggatgtcgactggggccatcgcctcggcatgggccacgccttccgccgcttcgagcatcccgaggccctggtcgccgcgttcgctgccgagcaggccaagtcgccgcagccgacctatctgtcgatcgacaaggacgtgttcgccgcggacgtcgcccgcagcaactgggaccagggccgcttccagctggaacacgcgctggtggtgatcgaagcactgcgcgccggcggcctggtcggcagtgacatcaccggcgaagtgtcgttggccaactaccagagccgcttcaagcgctggctgtcgtcgctggatggccagccggacgtcagcgccgatgatcttcctgcctggcaggcccggcaccagcaggtgaaccgcgaactgctggcggcaatggccgccgtgccgacggcctgctga

SEQ ID NO: 536237 - DNA, 1065 bp, Stenotrophomonas maltophilia
atggagatgacgtcacgcgcatccagcaccgcgctggaaccggccgcgctgctggagggcttcctggcccacccgccgctcggattcgaggcaggccgccttcccagcggcctgccgtccttccgtgcaccgctggacctgaccacgacgatggacgacgaactgcgcggcaggctgctcggcctcccgctgtcgcgcctgtggcggccgtggatcacctggaagacccgcttcgtcggtgccaccagcaccgagtacaccccgctgccggcacacgtcgcgccggaggcgctggccgaggacgtgacgcgtcacgcgatcggcgatacccggctgctggtggtcaaggacctggcgatcgattcaccactgctggacgacgcggccaacgcgcacagcgctgccttcctgcaggcattgctggcgcgcggcttcgttgaactggaaggcatgccgctggcctgggtggcgatcgatttcgattcgatcgacggctatctcggccgcctgtcgtcctcgcgccgcaagaacatccggcgcaagctgcgctcgcgcgacgacctgcagatcgactgcatcgccactggtgatccggccctggccgacccacggctgcaggccgaactgcatgcgctgtacctgggtgtgtatgagcagagcgcggtgcacttcgaccagctcggcctgccctacttccagcatctgctggccgacagccagggccagggacggatgttcctgtaccgccaccagggccagctgatcggctggaacctgtgctacgtgcatgccggcaagctggtggacaagtacatcggcctggcttacccgcagtcgcgcgagcacaacctgtacgcggtcagctggatgcacaacctcgagtacgccctgcagcacggcctgagccactacgtggctggctggaccgactcgcggatcaaggccgagctgggggcccgcttcacctccacccggcacgcgatccatgcccgttccccgctgctgcgtgccgccctgcgccggctggccccgtacctgcagggcgaacctgatggaggcggctga

SEQ ID NO: 536238 - DNA, 1401 bp, Stenotrophomonas maltophilia
atgaacatttttgacaagaacgccgacgccgctgcctccgacgcgcagctgctggccgacgaagcccgctacagctccttcggcgacaccgtccactacgtcgacccgccgaagatcttccagcgcggcgaaggcagctacatgttcgacggtgcgggcgtgccctacctcgacctgcagatgtggtactcggcctgcaacttcggctacagcaacaagcgcctgaacgacgcgctgaaggaccagatcgacaccctgccgcaggtcgccagccagtacctgcacccgacccgcgtgcagctggccaagaccattgccgtggacatgcacgagaagttcggcctcgacggccgcgtgcacttcaacgtcggcggcgcgcaggccattgaagactcgctgaagatcgtgcgcaacgcgcgcggcggcaagagcctgatgttcgccttcgaaggcggctaccacggccgcaccctgggtgcgtcttcgatcacctccagctaccgctaccgccgccgctacggccacttcggcgagcgtgcgatgttcatcccgttcccgtaccccttccgtcgcccgaagggcatgaccccggacgagtattccgaccactgcgtgtggcagttcgagcgcctgttcgaaagcgagtacaacggcgtgtgggatcccaaggtcggccaggccgagtacgccgcgttctacgttgagccgatccagggcaccggcggctacgtcattccgccgcgcaacttcttcaccggcctcaagcgcgtgctggacaagtacggcatcctgatggtcgtcgatgaaatccagatgggcttctggcgcaccggcaagctgtggtcgatcgagcacttcggtgtcaccccggacgtgctggtgttcggcaaggcgctgaccaacggcctgaacccgctgtcgggcctgtgggctcgcgaagagctgatcaacccgaccgtgttcccgccgggctccacccattccaccttcaactccaacccgctgggcacccgcctgggcctggaagtgctgaagctgggcaaggaaatggactacgagcgcaccgtgccggagaagggcgcgtacttcctcgacggcctgcgtggcctgcagaagcgccacccggaaatcggcgacgtcgacggcctgggcctggccctgcgcgcggaaatctgccaggccgacggctacaccccgaacaaggaactgctggaccgcatggtcgacatcggcctggccggtgacctgctgcacgacggcaagcgcatgggcctcgtgctcgacgtgggtggctggtacaagaacgtgatcacctttgcgccgtctctggacatcagctacgaagaaatcgacctggcgatcaccctgctcgaccaggcgctgaccaaggccaagggctga

SEQ ID NO: 536239 - DNA, 717 bp, Stenotrophomonas maltophilia
atgcactggagcatcctgtgtgacttcgatggcaccatcagcctcgaagatgtcatcgactcgctgctggaaaagtacggccagccgggctggcaggaactggaagaccaatggaaggctggaaagatcggctcgcgtgaatgcatgcagggccaggtgcggctgctgaagctggacccggccacgctcgatgcgcacctggaccaggtgcagatcgatccgggcttcgtcgccttcgtcgcccgcgccgagcagctgggcgtgccgctgcgcatcgtcagcgacggcctggattatgcgatccaccgcatcctcgccaaccatggcctgtcgcgactgccggtggtggccaaccacctgcgctggtacggggaccactgggaactggaatcgccctaccaggccgaaggctgccgcagtggcacctgcaaatgcacctgcgccgcgcaggcgcgcgccaacgaagcaccgcgcgtgctgatgatcggtgacggcagctcggatttctgcgtatccgaagatgccgacttcgtgttcgccaagcgccgcctgatcacccattgcgccaatgccggcatcgggcatgccgccatcgctaccttccacgatgcaatcgcgctgttgccgcgcctgctcgatggcagcctgctgcagccacgccgcatcgacaccagcccgcagcccaccgcactgcccctgctgctggccaccgcctga

SEQ ID NO: 536240 - DNA, 1203 bp, Stenotrophomonas maltophilia
atgagcctgttagcgcgcgaactgcccccgacggctggcctgccgatgcaggccagcgatttcctgcccggtggtggcgacctgcgcgacgtcctggccagccagctcggcacaccgccgctgcagctgacctgttccggtacgcacgcgctgctgatcgcgctgcgtacgcttcgcaagcgtgcacccaagcgcgacaccgtgatcctgccggcctatacctgcccgctggtgccgatcgcggtgcacagcctgggcctgcgcgtgcagctgtgcgatacccgccacggtcatttcgacttcgaccccggccagctcaagcgtctggccgatgcgcgcacgctggcgatcctgccgacccacctgggcgggcgcatcgccgatgtcgagctggcctgcgaggttgcgcgcggcgctggcgcctgggtgatcgaggatgccgcgcaggcgctcggtgcacgggtcggcagcagcagtgtcggcctgcgtggcgatatcggattcttcagcctggccgccggcaagggcctgagcctgcacgaaggcggcctgctggtcagccgcgatgacgagctgcgtgccgcgctggccggacatgccgccgaacaggtgcgttccagcctgcgctgggaactgctgcgcagtctgcagctgcttggcctggccgcctgctatcggccatcgctgctgtcgttggtgtacggcaatccgctgcgcagtgcgttgcagcgtggcgacctggaagaagcggtcggtgacattttcccgctgcagattccgcagcaccgggtcagccagtggcggcagaacatcggtgcccatgccgcgcggcgcctgccggccttcctgcaggcagggcgcctgcgtgcattgcagctgcgcgtgcagctggcacagctgccagccgttgaggtggtcgacggccttgccggtagcggtggcacctggccgatgctgatgctgctgctgcccagccagcgcgcccgcgatgccgtattgaaagacctgtggccacgcgggctcggcgccagccgcatgttcatccatgccctgcccgactacgcgtacctgcgcggcatcgtgccgcaggacgacatgcccaacgcacgcgacttcgccgcacgcatgcttacccttggcaacagtgcctggcagacccgtgaagagacggccgaaatactgcaggtgctggcccgcgcgtga

SEQ ID NO: 536241 - DNA, 399 bp, Stenotrophomonas maltophilia
atgaggcgcctctatgtcatcggcttcccgctgctgatggccttcgacacgctggcccagctgtgcttcaagtacgccggtgatgccgcgctgccggtcgaggccaacaccgcgtggctgctgcgcgtgctgtctcagccgtgggtgtacggcgccatcctcggctacgtgggtgcattcttcacctggatgagcctgctgcggcatgcgccgatcggccccgcattcgccgcctcgcacctggaagtgatcagcgtgctgctgctgtcggcgtggctgttgaacgagccgctgacgctgcaccatctgctcggtgcggtgctgatcgtggccggcatcgtctgcctcggccgcgcggaagccgacgacccgcacagccccgccgaaagtgccccatga

SEQ ID NO: 536242 - DNA, 360 bp, Stenotrophomonas maltophilia
atgggggcacttgccacgctgctgtggctggccaatgtggtactcgataccggtggccagctcgccttcaaggccgccgccagcgatccgcaggaaggcgaaggactgcaacgctggaaacacatgctcagccgcccctggctgtggatcggcatcgcctgctacgtgcttgagttcgtcgcctggatcgcgttcctgtcgctggtgccgttgtccaagggcgtgctgttgggctcgatcaacatcgtcgcgctgatgatcgccggccgtttcctgttccgcgagaaactcacgccgctgcgggtgaccggcatgttgctggtaaccgcaggcgtggcggtggtgggggccggctcatga

SEQ ID NO: 536243 - DNA, 837 bp, Stenotrophomonas maltophilia
gtgaccgaatcgcacgacttcttcctccccggtggcccacagggcgtgctgctggtccatggcctgaccggcaccccggcggaaatgcgcatgctgggcaaagggctgaacaacgccggtttcaccgtgcacggcgtgcagctgcccggccactgcggcagcgtggatgacctgctggcgaccacctgggaacagtggtaccagggcgtggaggatgcggcggcaaccctgcgcggcaaggttgaccagctgttcgtcggcggcctgtcgatgggcgcggtgctgtcgctggccctggctgcccggcgcccggaatgggtgtccggggtcggcgtgtacggcgccacgttccgttacgacggctggaacattcccgccgtagcccgcttctcgttcctgctgccgtggttcaagcgcttcaacatcggccgcgaccgcatgttcatggaagaaccgccgtacggcctgcgtgacgagcgcctgcgtgcgcaggtgagcgccgccatgctgtccggcgacagcgccgccgccggcctaccgggcaacccctggcatgcgctggccgagatgcgtgcgttgagcaactggacccgacgccatctgcaccaggtcaccgcaccgtgcctggtgatgcacgcccgcgaagacgacgtggccagcatgggcaacgccgagctggtgatgtcgcgggtcagcggtccgaaggaactggtggtgctggaagacagctaccacatgatcaccatcgaccgcgaacgccgcgacgtgatccgccgcagcgcgcgctttttcaccgagatcggtgaacgcacgggcgtgctcaaggcggtggcctga

SEQ ID NO: 536244 - DNA, 1380 bp, Stenotrophomonas maltophilia
gtgatcagtggaccgcccagcctgcgccggcgcctgctcgccttcctggcgttgccgatgctgggcctgctcaccttcaacacgatcctggcctattacgttgcgctggactattccaaccgcatccacgaccgcaacctgatcgacgacacgcattcgttcgcacagatgctgagcaccatgccggtgaccagcgacctgtctccgcaggcgcgcttcctgatcgagtacgaccccgacggccatcgctatttcaacgtcgacagcagccgcatgggtacgctcagcggcaatgcagacttcagcccgtatgccccttcgcaggactgcgccggcgtgcatccggcgctgtacgacggcaacctcaatggccagcaggtgcgcatggccaccgtctgcacgcaggcgatgaacgatccgcaggaccagctggcggtgaccgtggccgagagcatggccgaccgccggcagcgtgcgcgcgagatcctgatgatcatcatcccgctgatgaccatgctggcgctgggtaccgcggcgctggtctggttcggcgtgacgtacggcctgcgcatcctgaccccgctgaggacccgcctggcgcagcgccgcggcgaactggcgccgatctccgatgccgacgtaccggaagagatccagccgctgatcagcaccatcgacgatctgttcgcgcgccaggcggaaatgatcaccctgcagaaccgcttcatcgctgatgccgcgcaccagctgcgctccccattggcgggcatggcactgcacgtggaccaggcgctggcgcacggcgacccggacacggtgcgcgaggcactgcagcacatccgccggctcaaccagcgcacggcacgggtcagcacccagctgctggcgctgagccgggcacagaccgtgccggaaacggtcgaggcattggatctgggcgttctggtaccgcagtgggtcggcatgcgggtaccggaagcgatccgtgatggcatcgatctgggctaccgcggcagcccccatccgctgcgtgtactcggcaacggcgccatgctgcaggaggcgctggacaacctgatcgacaacgcccttcgttatgccggccgcaatgcgacggtcacggtgggcgtgcatgcgctggacgacaatgatgtcgaactgtatgtggaagacaacggtcccggcgtgcccgacgacgtgatgccacggctgggcgagcgcttcttccgggcgccgggcaccgctgccagcggcaccggcctcggcctggccatcgcgcatgaggcggtggagcacttcggcggccgcctgagctttctgaaccgccccggtggcggattgaaggtcgccatcacgctgccgctgctgaaggcgccctga

SEQ ID NO: 536245 - DNA, 684 bp, Stenotrophomonas maltophilia
atgcgcgttctgattgctgaagacgacccggatatcgcctccggcctgtgcgcctcgctgcgccggcagggccatgtggtcgaccacgtcgacaacggcgcgcacgccgacgccgcgctgggctcgacccagtacgcgctgctggtgctggacctgggcctgccgcagttggatggccgcgacgtgctgcagcgcctgcgccagcgtggtgatggcctggcggtgctggtggtgaccgcccgtgacggcctggcagaacgcgtgcgtgtgctcgacctcggcgccgacgactacctggtcaagccgttcgcactggacgaattcgaagcgcgcgtgcgtgcgcagctgcgccgggtcaccagcaatggcaacccggacctgcgcatcggccgcctgcgcatcgacctggccgggcatcgggtgtggatcgacgaccagtcgctggaactgaccgcgcgcgagttcggcctgctgtcggcactggcggtacgcgccgagcgcatcgtgtcgcgcgcgcaactggtggaagcgctgtgcgactggggccaggacctcaccgacaacggcctggacatcgccctgcaccgcctgcgccggaagttgcagcccggcggcatgggcatccgcaccgtgcgcgggctgggctacatgctggaagacgcgcaggacgacggcaccccgtga

SEQ ID NO: 536246 - DNA, 1128 bp, Stenotrophomonas maltophilia
atgtcgcgcgatcgcccttccctgctgaccgccctgctgttacccctgctggcctgcgtcacagcaaccacgcaggcccgcgaggttgccgcgcccgccgaccacgtgcaggccgatggcccctatgtgttccgccagggcaaccagctgcaggccagatggatctgcgacgacaaggtcgagtcgcacacgcttgccacgcaggcctcaggcaccgacatcgccccgcgttgcggctacgaacacagcgtgcacgtggctgcacccaatgcaccttcgatctccgtgttgccggccgtgccgcgcatcgttgcgctgtccgacatccacggccagtacgggctgctggtgcgcctgctgcgcgccaataaggtgatcgacgcacaggaccgctgggcgctgggcaaggacaccctggtcatcgccggcgatgtgttcgaccgtggcccacaggtgaccgaagcgttctggctgctttacggcctgcagcaacaggcggctaccgccggtggcgcggtgcacttcgtgcttggcaaccacgagaccatggtgctgtacgacgacctgcgctacgtcaacccgaagtacctgcgcagtgcccagctgctggggcgcagctacccgcagctgtatggcgccgactcggtgatcggccagtggctgcgcacccgcccggtgctgctgaagatcggcgacaccctgttcctgcacggcggaatttcgcccgaagcagtacagctggcgctggacccggcgcgcactaatgcggcctaccaggcctcgctcggcctgcccaaggccgaagtgaaggccgacccggccaccgcaccgctgtatgacggcaagaccagcccgatctggtaccgcggctacttcgatggccgcctcgacaccgcaggagtgcagaaggtgctcgaccgcctgcagctcgcgcgcatcgtggtcggccacacttcgatgccgcacgtcagcagcttccatggcgaccgcgtgatcgccatcgacagcagcatcaagaacggcgagaacggcgaactgctgttcatcgaagatggcaaactcagccgtggcctgcttgacggttcgcgggtgccgctggcgcagggcgagccgggcctgcaggactga

SEQ ID NO: 536247 - DNA, 450 bp, Stenotrophomonas maltophilia
atgcacgccgacagtccctgtcctgtagcccgcagtgccgacctgctcggtgaccgctgggcattgctggtgatccgcgacgcgttcgacggcatcacccgcttcggtgatttccagcgcagcctcggcgcggcgcgcaacatcctcagcgaccgcctgcgccggctggtcgaggccggcatcctgcagctgcggccggcctccgatggatcggtctaccaggagtacgtgctcaccgccgccggccaggaactgttcccgctgctggtcgcgctgcgccagtggggagagcgccatcgcttcggtatgggggaagcccattcacagctggtcgaattggcgacgcggcggccgctgccctacatgcagccgcgcgggcgcgacggccagccgcttcagcccgccgccacccgcgtacgcaaactcaaggacgacgggcgcgacacctga

SEQ ID NO: 536248 - DNA, 1278 bp, Stenotrophomonas maltophilia
atgtggttgcagtttaaaaccaatggcgatagcctgcatctggtttcaaattgcaactacaagatgagtgccgcatctcttccccgcccgctgctggtcctgcttgcggttgccgccggcgtcagcgttgccaatgtctactacgcacaaccgctgctggatcagcttgcacgcgcctttgcactggaccgggccgtggccggcgcggtgctggctgccacccaggccggcagcgtgctggcgttgcttggcctgctgccgctggcggaccgcggtgaccggcgacgcctgctgcggctgcagctgatcgcactggtgctgaccctgttgtggctggcggcgtcgcgcacggcgagctggctgttgtctggcatgctgctggccggattgctgggcacggtgctgacccagggcctgatcgcctacaccgccacgctggcaccgcccgagcagcgcggtcgcatggttggcgtggtgcagggcggagtgttcatcggcctgctgctggcgcgcgtggtgtcgggtacggtggcggcggcctttggctggaagatggtctacctgctgtccgcggtggtgatggcggcattggcggcgctgctgtggcaacgcttgcccgcagtaccggtgccgtcggtccctccacgctggcatgagctgctgggctcgatgctgggcatgctgtgccggaatcgaatgctgcgcgagcgtggcccgctggcgttgctgttgtttgccggcctcaacgtattctgggcggcggcgcccttgccgctgtcggccccgccgctgcactggtcgaccgcagccatcggcgcgctcggcctggccggcgtggtcggtgcgttgatggcggcgcgggtcgggcactggatggactgcggtttcgcacatcgggtcagcctcggcgcgctgctgttgatgctggtcgcgtggtggccgctgctgggcctgccgcaatcgctgtccttgctgttgggtgtggtcgtgctcgacctgggcggccaggcactacatgtttcgaaccaggcattgctgctgcgtgcaccggcagaacagcatgggcgcctggtggctttgtacatgctgttctatgcggtgggcagtggtgcaggagcggcggcggggccctggatgcaggtgcggcatggctggcctgccgtgtgcctgctgggggcaggcatcgcgttgctggcgctgctgtggtgggcagcatggcgggtggtggcggtgaaagcagcggctggcgctggtgtcggtggcgtcggctgtcggtag

SEQ ID NO: 536249 - DNA, 1416 bp, Stenotrophomonas maltophilia
gtggaaccaccccaactggacgatgccagccagccgctggccgaggcctggcagcactgcctgcaacaggccggccctgccgccaccgcgctgctgcacgccgccgccgccgatgccccgccggcgctggcccaacgcttctacgaagtactgttgcaggacgggcgtgcacgccgcttcctgtcccatgaccaggtcaagcagcgcctgcagccagccatgcaacgctggctggtgcagctgctgaccaccgatgccgacggtattgccagcaccgttgcctcacagcgcgtgatcggcgatgtgcatgcccgggtcggcattccggtcgatctggtcacccgcggcgcgcgcgtgctcaagcacgaactgttcgtgcgcctgcgcgacgacgcgcccgacagcgccaccgcgttcgccgccatcgactgcctcagcgcgatcatggatatcgccatggaaggcatgaccctggcctacacccatgcacgcgagcgctccacccgtgccgatgctgcgtaccggctgttctcgctggtgcagaacgtcggcaccgaacgcgagcgtcaacgcgcactgctgctggactgggagaacgccctgctctacgcactcgccggtcatgtgcaggccagcgacaacgccagcctggccacctcggagttcggcctgtggttcacccacaagggcatccccagcttcggcgaaagcagcgaaacgcagcaggtgggccagttgatggcccgcattgacggccacctgcagcgcgcgagcggcgatgccccggcacagcgactggcggtgctgccggccatacgcgaggacctggccgccatccgcaccctgatgacactgctgttcgagcgcatcggcgaactggatgccggcagcgatgccctgaccaatctgctcaaccgccgcttcctgcccaccgtgctgcgccgggaaatcgagctggccacgcgcaaccgcacaccgttctcgctgctgctgctcgacctggatcatttcaaggcaatcaacgacggccatggccacgatgccggcgaccgcgcgttgcagcatgtggccggcctgctcggccagctcacgcgtggcagcgactacctgttccgctatggcggcgaagaattcgtggtggtgctggtggccgccagcgaatcgcaggcgaccgtgatcgccgagagcctgcgccggcagatcgcacagtcgccggtagcgctggccaatggccaggtgctggaactgagcgccagcatcggcgtggccggtcacgatggtcatccggattacgagcggctgatggcacgtgccgacgccgcgatgtacgaggccaagcgcagcggccgcaaccgcgtggtggtggccagcgaggcattgcaggaggcccccgggcggcgcgcgctgcagcggtaa

SEQ ID NO: 536250 - DNA, 2250 bp, Stenotrophomonas maltophilia
atgtctcctgccgttgtcctttcgccgcgcccgctggcgcttgccgttgccgccctgctggcgggcagcgccctgaccgccaaggctgaaaccgacgccaccgatatcgacacggtgcatgtcaccgcctcgcagattgcccgccaggcgttgggcacttcgaccatcaccgctgaggacatcgccaggcgcccgccggccaacgacatcgccgaactgctgcgcaccatgccgggcgtcaacctcaccggcaacagcgcctcgggccagtacggcaacaaccgccagatcgacctgcgtggcatgggcccggaaaacaccctgatcctggtcgatggcaagcgcatcggtgcccgcgatgccgtgcgcatgggccgcagcggcgagcgcaatacccgtggcgataccaactgggtgccggcggagatgatcgagcgcatcgaagtgctgcgcggtccggcggcagcacgctacggctccggtgcttctggcggcgtggtcaacatcatcaccaagcgcccgaccggcgacctgaccggtgcggtcgacctgtacgggctggtgcccgagcacagcgccgaaggtggcagcgagcgtgtcggcctgcagctgagtgggccgatgaccgataccctgtcgttccgcctgtacggcaatctcaacaagaccgacgccgactcgctggacctcaaccgccagtacgccaccaacccgaacgcagtgccgccggctggccgcgagggcgtcaagaaccgcgatgtcaacgcgctgctgcgctgggacgtgaccgccaaccaggtggtcgagttcgaggccggcaccagccgccagggcaacatctatgcgggtgaccgcgcggtcagcaccaccggcacctcgacaccgatcgatctgggggccttggccgagcagcaggccgagaccaaccgcatgtaccgcaacaccggcgcgatcacccatcgcggccgctggggtgatgtgacctcgcgggtaacggcggcagtggaggcggtgaacaactcgcgcatcaacgaaggcctggccggtggcccggagggcagcttcaacggcaccgactggtcgacctcgcgcctgcgcaactaccaactggacggcgaagtgagcttcccgaccacgctgggcggcgccgagaacatctggacgctgggctttgaatacctggacagccgcctgaccgacccgtactcgatgagccagtccagcagcagcggcggcggcattccggggctgtcggccgatcgcgcgcgcggcaagtccgatgcgcagaccaccgccgtattcgtcgaagacaacatctacctgggtgagcgctggatcgtcaccccgggcctgcgcttcgatcaccacagccagttcggcaacaacaccagccccagcctcaatgcgcagttccgcatcaacagcgactgggtggtgaaggggggtatcgcccgtgcattcaaggcaccgaacctgtaccagtcgaatccggactatctgtattacacccgtggcaatggctgcccgaatgcactgccgagcctgggcgccggctgctacatgcgcggcaacgcggacctgaaggcggaaaccagcctgaacaaggaactgggcatcgagtgggcaccgcagagcggctggcaggcgtcgttgacctacttccacaacgactacaaggacaagatccaggccggctacacccagatcgggctgaccgccgacaccaagggccgcatattccgctgggagaacgcacccaaggcgatcgtgcaggggcttgaaggcaacctggtgatcccgctgctgggcgagcagggcagccgcctgaagtggagcaacaacttcacctacatggtcgagaacgagaacaagaccacgcgccagccgctgtcggtgatcccgaagtacaccatcaacaccatgctggactggcaggccaccgacaagctgtcgctgctgctgaccggcacgttctacggcaagcaggaaccggccaccaccaacatcaacaacgacccgcgctgcaccggcacctgcgacccgtcgattgcactgcaggatcgcggtgcgtacaacatctggggcgtgagcgcgcgctacaaggtaaccgagacggtcagcttcggctttggcgtcaacaacctggccgacaagcgcctgttccgcgaggccaacagcagcgatgccggtgcggcgacctacaacgagccgggtcgcgcgtactgggccagcctgcgcttcgggttctga

SEQ ID NO: 536251 - DNA, 981 bp, Stenotrophomonas maltophilia
atgggccacgaccacgatcacctgccatccgagatccgccacgagaaacccttgtggtgggcgctcggcctgacctccaccttcctcgtcgtcgaggtggtgggcgcgttctggaccaacagcctggcgctgctgtccgacgcggcgcacatggccaccgatgcgctggcgctgatgatcgcgctggtcgcggtacggctgagccgtcgcccgcccgacgcgcgccgcacctacggctatgcgcgcctggaagcgctgggcgcgatgatcaacggtgcgatgctgttcgtggtcgctggctacatcctgtgggaggccattgggcgtttccgcgagccgcaggagattgcctcgtcgggcatgctggtgattgccgcagcgggcctggtcatcaacctgatctcgatgcgcctgctgcaggccggcagcggcgagagcctcaacgtgaagggcgcctacctggaagtgtgggcggacatgcttggctcggtggcggtgattgctggtgcgctgttgatcaagtggaccggctggaagccgatcgatcccatcctggcggtgctgatcggcctgtgggtgctgccgcgcacctatgtgttgatgcgtgaggcgatcaacgtgctgctggaaggcgtgcccaagggcatggacgtggccagggtacgtgacagcctgtccggccacgctgcggtactggatgtgcatgacctgcacgtgtgggcgcttgcttccagcaccccagcgctcaccgcgcacatcgtgatgcgcgacggcaccgatgccgatgcgctgcgccgtgaactgggcgggcgcctgcacgatgacttcggcatcgagcacgtgacactgcagatcgaagcggaccactgcggcgaagcctgtggtgagccggtgccggccaagggcggcgagcacgagggccatgagggccatgaccacggcgaggacgcgcagggccatcgcggtcacgtgcatcgctga

SEQ ID NO: 536252 - DNA, 675 bp, Stenotrophomonas maltophilia
atgaatacggtgatcgaccccggacgctgggaaggcagcgtcgccactgcccgcgcgcagcagatccagcttgccggccgcgtggagcgccaggaccgcttgccccgcgacatgcgctggctggccgggctggatgtcggctttgaagacaacggcgccatcacccgcgccgcggcggtgctgctggatgcgaagacgctgcagcccgtggcgcaggagatcgcgcggattcctacggtgatgccctacatccccggcctgctcagtttccgcgagctgccggcgctgctggcggcactggcgctgctgccgcaggcgccggatctggtgttcgtcgatggccacggcatcagccatccgcgccggctgggcgtggccgcgcatctgggcgtggtcaccgacctgccgagcatcggcgtggccaagtcgaagctggtgggccggttcgtcgagccgggcgccgaggccggtgcacatacgccgctgctggagggcgatgaacaactgggctgggtgctgcgcagcaaggtgcgctgcaagccgctgttcgtggccggcggccatcgggtcagtgccgataccgcgctggcctgggtgcagcgcaccctgcgcggttaccggctgccggagccgacccggctggcggatcggctggcctcgcgacgggacgaatag

SEQ ID NO: 536253 - DNA, 750 bp, Stenotrophomonas maltophilia
gtgacccgtaaactcgtactgttgcgccatggccagagccagtggaacctggacaaccgcttcaccggctgggtcgatgtcgacctgaccgagcaggggcgccgggaagcggctgccgccggtcgcctgatgcgcgaggaaggcctgcagttcgacgtcgcccacacttccgtgctcaagcgcgccatccacaccctgcagggtgcactggccgagctggagcaggactggctgccggtgaacaagtcctggcggctcaacgagcgccactacggcggcctgcagggcctggacaaggcagagaccgctgccaagcacggcgaagaccaggtcaaggtgtggcgtcgttcgtacgacatcccgccgccggccatggacctggaagatccgggccaccctatccacgaccgccgctacgccggcctggaccgcaacgcgctgccgggcaccgaatcgctggccacgaccctggaccgcgtgctgccgtactggcatgacgccatcgcgccgcagctgaaggacggcaagaccgtgctggtcaccgcccacggcaactcgctgcgtgcgctgtacaagtacctcaacaatgtctcgcgcgaggaaatcctcgagctgaacatcccgaccggcattccgctgctgttcgaactgaacgacgatctgaccgtgcagtcgttccgctatctgggcgacccggaagcggcacgcaaggctgctgaggccgtggccaaccaaggcaaggcgaaataa

SEQ ID NO: 536254 - DNA, 2094 bp, Stenotrophomonas maltophilia
atgaacgtccgcaacctggtcccgctgggcctgaccatcgccattgctgcctcgctggcggcctgtggcaagaatgaagccgcaccggcggccagtgccgacgccaagccggccttcgaccagtcgcagatcaagacgccgctgatctcgctcaacagcgccgatctggacccgtcgatctcggcctgtaccgacctcaatggcttcgtcaacagcaagtggctgaaggccaacccggtgccgggcgaccagaccacctggggcagcttcgagatcctgcgtgagcgctcgctggaagtgcagcacgcgctggtccagcaggccgccgccagccaggccaaggccggttcggtggaagccaagatcggtgacatctggaagaccggcaacgacgaagccaagatcgaagccgccggcctggcgccgctgcagccgcagctggacaagatcactgcactgaacgacaccgctgccatcacccagtacctgcgcgacagccaggccgagggcaagggcgtgctgttctcgctgttcgccaatgccgactacaaggattcggccaacgtcatcgcctacgtcggccagggcggcctgggcctgccggagaagggctactacttcgacgacgcgcaggccaagatccgcgacgcctacgtggcctacatcgcacaggtgctgaccctgtccggtgtggacgcggcgcaggccgccgagcaggccaaggccgtgatggccttcgaaacccgcctggccaaggcctcgatgtcgcgcatcgaaatgcgtgacccggccaagcgctacaacccgctcagagccgcagatgccgacaagctgaccccgaacttcagctggaccgcgctgttcgacaccctgaaggtgccggccgcacagaagttctcgctggcgcagccggccttcttcggtgaaatggacaagatgctcgccgatgtgccggccagcacctggcaggcctacctgcgcttccacaccatcgacgatgcctcgccgtacctgagcagccagttcgagaaggccaacttcgatttctacggcaccaccctgcgtggccagaaggaaatgcagccgcgctggaagcgcgtgctggagtcggtcaacggcggcatgggtgaagcgctgggccagctgtacgtcgacgccgtgttcccggccgagtcgaaggtcgccatgcagcatctggtggaaaacctgtcgcaggcactgaaggcgcgcctggagcagctgccgtggatgggcgaagaaaccaagaagaaggcactggagaagtgggccagcttcaccccgaagatcggctacccggacaagtggcgtgactgggcaggcctgcagaccaacggggacagctacctgggcaacatgcaggcggcgcgtgcgttcaactaccgctacatgctggacaagatcggcaagccggtggacaagaccgagtggggcatgaccccgcagaccgtcaacgcgtactacaacgccaccaagaacgagatcgtgttcccggcggcgatcctgcaggcaccgttcttcgacgccaaggccgatccggcgctgaactacggcggcatcggtgcggtcatcggccacgaaatgatgcacggctacgatgactcgggcagccagttcgccgccaacggcaatttcgacaactggtggaccgacgccgaccgcaaggccttcaccgagcgtaccgaccagctggtcgcgcagttcgacggctatgaatcggtgccgggcgtgttcgtgaagggcaagctgaccctgggcgaaaacatcggcgacctgggcggcctgaccgtggcctacgacgcgctgcagatggcgctgaaggaagatccgaaggcgaatgtcgaggttgatggccacagccaggaccagcgcttcttcatgaactgggccaccgtgtggcgccgcaacttcaccgatggtgagctgcgcgtccgcctgaacaccgacccgcatgcgccggccaacttccgtgccaacggtgcgccgtcgaacatgccgtcctatgccgctgcattccagtgcaaggccggtgatgcgatggtgcgtgccgacgacaagcgcgtggtgatctggtaa

SEQ ID NO: 536255 - DNA, 612 bp, Stenotrophomonas maltophilia
atgttccctgacgccgtacccgcccccgacctgctgcacgcgcaggcctgcctgatcgatgccctctcgatgtcgctgcagatgcgcgacgcctacacccgccaccactgcgaccgcgttggcctgctcgcgcagcgcctggccacgcactgcgatctcgacgacgatgcctgtgcgcagatcggcctggccgcgcgcttccacgacgtcggcaagatcggcattcccgacgatgtgctcctggcaccgcgccggcataccgatgaggagcgcgcgatcatgcgcgagcatccggtacgcggcgaacacatcttcctggccaccggccgcagcgacgccgcaccggtcgcacgactgatccgcgcccatcacgaggcgtttgatggcagcggctaccccgacggcctgcgtggcgagagcattccgctgggctcacgtatcgtcaccgttgtcgatgcctacgatgcaatgaccagcgtgcgcccctatcgcgatgcgatggagcatgaaaccgcattgcggatcatcgaagcgcagtccggcgggctggtggatccctacgtgctgcagcgcttccgtcgcatgctggcgcgggagcccgagctggcctga

SEQ ID NO: 536256 - DNA, 3465 bp, Stenotrophomonas maltophilia
atgtcgcgtacctcataccccgccccgccgctgccgcgcgccggccagctccgcgcctggtggcgcgcccccgcctcgccgaccgccctggcctggtatctggcccaggccgcgcgcgcgcacgacgcgccgctgctggtgatcgcccgtgacaaccacggtgccaaccagctcgaagccgacctgcagaccctgctcggcggcgacccggccctgccggtggtcgccttcccggactgggaaaccctgccctacgaccgcttcagcccgcatccggacatcatctcgcagcgtttgtccgccctgcaccgcctgccctcgctgaagcgcggcctggtgatcgtgccggtgcagaccctgctgcagcagctggccccgcgcagctatgtgatcggtggcagcttcgacctgaaggtcggccagcgcctggatctggaggccgagaagcgccgcctggaaagtgccggctatcgcaacgtgccgcaggtgatggaccccggcgacttcgccgtgcgcggcggcctgctcgacgtgttcccgatgggtaccgacgagccgctgcgggtggaactgctggacgaggacattgattcgatccgtgcgttcgatccggaaagccagcgttcgctggacaaggtcgagtccgtgcacatgctgcccggccgcgaagtgccgatggacgaggccagcatcgcccgcgtgctggccgcgctgcgcgagcgtttcgatgtggatacccggcgcagttcgctgtaccaggatctgaagtccgggctggccccggccggcgtcgagtactacctgccgctgttcttcgaacgcaccgccaccctgttcgactacctgcccgacggcagcctgccggtggtctgcgccggtgcgtatgaagcgtccgtcgcgttctgggcgcagaccgcggaccgctatgagcagcgccgccatgatgtggagcgcccgctactgccgccgtcggcgttgtacctgtcgccggagctgctgcgcgagcgcctgaacgatgccccgcgcatcgaggtgtggtcggctgaccacgcgcgcatcgccgatgcccatgcgctgggcgaccagccgctgccgccgctgccggtggccgcacgcgaggcccccgcaggcgacgcgctgaagtccttcctcggccactatccaggccgggtactgattgccgccgattcgcccgggcgtcgcgaggccctgctggaagtgctgcaggccgccgagctgaagccgccggtggtggccgacctgcccagcttcctcgccgacgatgcgcgctttgcgatcgcggtggcgccgctggaagatggcttcgcgctggacgacccgcgcatcgcggtgctgaccgagcgccagctgttccccgagcgcgccggcagcacccgccgcacgcgccgtgccggccgcgagccggaagcgatcatccgcgaccttggcgagctgaccgagggcgcgccgatcgtgcacgaggaccatggcgttggccgctaccggggcctgatcgcgatggacgtcggtggcatgcccggcgagttcctggaaatcgagtatgccaagggcgaccgcctgtatgtgccggtcgcccagctgcacctgatcagccgctactccggtgcttcggcggaaaccgcgccgctgcattcgctgggtggcgagcagtggagcaaggccaagcgcaaggccgccgagaaggtgcgcgacgtcgctgccgagctgctggagatccaggcccgccgccaggcgcgtgccggcctggcgctgcaggtggaccgcgcgatgtacgagccgttcgcggccggcttcccgttcgaggaaacgccggaccagttggccgccatcgatgccaccctgcgcgacctggccagcagccagccgatggaccgtgtggtctgcggcgacgtcggcttcggcaagaccgaggtcgcggtgcgcgcggcgttcgccgccgccagtgccggcaagcaggtggccgtgctggtgccgaccacgctgctggccgagcagcactaccgcaacttccgcgaccgtttcgccgattacccgctgaaggtcgaagtgctgtcgcgcttcaagagcaccaaggagatcaaggccgaactggagaaggtcgccgcaggcaccatcgacgtcatcgtcggcacgcaccgcctgctgcagccggacgtgaagttcaaggacctgggcatggtcatcgtcgacgaggagcagcgtttcggcgtgcgccagaaggaagcgctgaaggcgctgcgcgccaacgtgcacctgctgaccctgaccgccacgccgatcccgcgtacgctcaacatggccatggccggcctgcgcgacctgtcgatcatcgccacgccgccgccgaaccggctggcggtgcagaccttcatcacccagtgggacaacgcgctgctgcgtgaggccttccagcgcgagctcgcgcgcggtggccagctgtacttcctgcacaacgacgtggaaagcatcggccgcatgcagcgcgagctgtccgagctggtgccggaggcgcgcatcggcatcgcccatgggcagatgccggagcgcgagctggaaaaggtgatgctggatttccagaagcagcgcttcaacgtgctgctgtcgaccacgatcatcgaatcgggcatcgacattcccaacgccaacaccatcatcatcaaccgtgccgaccgcttcggcctggcccagctgcaccagctgcgcggccgcgtcggtcgttcgcaccatcgcgcctacgcgtacctggtggcgccggaccgccgatcgatcaccccggatgcggagaagcgcctggaagcgatcgcgtcgatggacgaactgggcgccggcttcaccctggccacgcacgatctggagatccgcggtgccggtgaactgctcggcgaggaccagagcggacagatggccgaggtcggcttcagcctgtacaccgaactgctggagcgcgcggtgcgcagcatcaagcagggcaagctgcccgacctggatgccggcgaggaagtgcgcggcgccgaagtcgagctgcatgtgccggcgctgattccggaagattacctgccggacgtgcacacccgcctgaccctgtacaagcgcatttccagcgcgcgcgaaagtgatgcgctgcgcgaactgcaggtggagatgatcgaccgcttcggcctgctgccggatgcggccaagcacctgttcgccatcgccgagctgaagctgaaagccaacacgctgggcatccgcaagctggacctgggcgagaacggtggccgcatcgtgttcgagtccaagccgaacatcgatccaatggcggtgatccagctgatccagaaacaaccgaacctctacgccatggaagggcccgacaagctgcgcatcaagcacccgctgccgttgccggaagaccgcttcaatgcggcccgtgcccttctgaccaccctcgccccgggttga

SEQ ID NO: 536257 - DNA, 546 bp, Stenotrophomonas maltophilia
atggccactcgcaaccgcatgccgccctggcatgagatcttcaaggctcccagcggccacgagctgctgatccgccccatccgcccggaagatggcgcaccgctgcaagcggcgttcagcctgttcggaccggaagaaatccgtgatcgtttcctgcaggcggtgaccgagctgtcgccggaaaccacccagcgcctgacccacccgaatcccaagaccgagatcaccctggtcgctgccgaatccctgcctgctggcgaagcagtggtcggtgcggtcgcccgggcctcgatcatccccggtacccgtgaagccgagtacgcgatcctgatcagccgcttcctgatcggccagggcctgggccggcagctgatgcgcaagctggtgaagtggggccgcggcaagtacctggaccgcctgtacggcgacgttgccgccgagaacgagccgatgaagcagctggccgcctcgctgggcttcaagccggtgccgcacccgaccggtgccgaaggcctggtgcggatggtgctggagctggacaactga

SEQ ID NO: 536258 - DNA, 858 bp, Stenotrophomonas maltophilia
atgaactatcgccacgccttccatgccggcaaccatgccgacgtgctcaaacacatcgtgcagctggccctgatcgacagcttcaagcgcaaggacagcccgttcttcgtgctcgacacccacggcggtgccggccgctacctgctggccagcgaagagagccgcaagaccctggaggccgaatccggaatcatgcggctgatggcccagcccaagctgccggaggtggtcgagcgctacctgaaggcggtacaggccgacaacccggtcggcgcgctgaccaattatccgggttcgccgctgctgagcgcacaggcgatgcgtgcgcaggaccgcatggcggtctgtgagctgcaggaagccgaaacggccacgttgaaggccctgttcgcccatgacagccgcgtcgatgtgcgctctggcgatggctatgcgctgctgcgctcgctgctgccgccgaagttcaacggcagcaagatcggccgtggcctggtcctgatcgacccgccctacgaagcccaggatgccgagtaccaggcggtgctggccgccctggccgaaaccctggcgcgctggccgcaggccacgtgtgccgtctggttcccgatcaagcagcgccggaccatcctgcatttcctgcgcaaggccaccgccctgccggtgaaatcggcgatgacgatcgagttcctggtgcgcccggacgactcgccgctgcgcctcaacggcagtggcatgctgctgctcaacccgccctggcagttcgaccgggtggtcggcccggccctgccggcgctgcgccagcacctgggcgaaccgggtgccagcacccgcctggattggctcaaagcacccgagtaa

SEQ ID NO: 536259 - DNA, 726 bp, Stenotrophomonas maltophilia
atgctgcgcgccatgacagctcctgttgcccatgtcctggtggtcgaggacgaagccgccatcgccgaaaccgtgctctatgcgctgcgcagcgagggctatgccgccagccactgcctgctgggcggcgaggccctgcaacggctgcaggccggggatatcgacgtggtggtgctggacgtgggcctgcccgacctgggcggcttcgaggtctgcaggcgactgcgcgcgcagcccgggccgtcggcgcagctgccggtgatcttcctgaccgcccgcaacgacgaagtggaccgggtgctcggcctggagctgggcgccgacgactacatgaccaagccgttctcgccgcgcgagctggtggcacgggtgcgtgcgcgcctgcgccgcgcggcaccggtcgtggcagcacccggcgccgatgcgggctggcaggaacatggcgcctttgccatcgaccgcgaaggccggcgcatccgcttccgtggccaggcactggacctgacccgctacgagtacgcgctgctggaagcgctgctgctgcgcccgggcgccatcctcagccgtgcgcagctgatggaccgtggctgggacagcagcgccgacagcgccgaccgcaccgttgatacgcatgtaaagacgctgcgcgccaagctgcgcgcggccggtgccagcgacgacccgatccgtacccaccgtggccttggctacgcgctggaggtctag

SEQ ID NO: 536260 - DNA, 1461 bp, Stenotrophomonas maltophilia
atgcgcctggtactgaagctgttcctgggcttcttcctgatcaccggcatcgcggcgttcttcgtgatgcgcgtgttcgtcaacgaagtgaagcccggtgtgcgccaggcgatggaatcgaccctggtcgatgcggccaacgtgctggccgaaatggccgccgccgacgtcaaggccggcaccatccgcagcggcagcttcacccgcaacctcgccaaggcacgccagcgcgacctgaaggcgatggtctggcgcttcccgaagcgctcgctggattaccgggtgaccatcaccgatgccaagggcatcgtcatctacgactcgctgggccgcgacctggggcgcgacaactcgcgctggaatgatgtctatcgcaccctgcgaggtgagtacggcgcgcgttccagtcccgagattgccggcgaagagggcgacacggtgatgcatgtggcggcgcccgtatatgacccggccgatgggcgcaccctcatcggcgtgctcagcctggcgcagcccaaccgcagcatcgatccgttcatcgccgccagccagcgcgccatcatcgagcgcggggcctggctgatcggcttgtcggcgctggtcggtgtgctggtgacgatgtggctgaccaccggcctgggccagctcagccgctatgcgcgtgcggtcagcgccggcgaaccggtgccgccgccgcgccgccgccgcgacgagatcggcgatctcggccaggcgctggaaacaatgcgccgcaagctggaaggcaaggcctacgtcgagcagtacgtgcagtcgctgacgcatgagatgaagagcccgctggcggccatccgcggtgccgccgagctgctgcaggagccgctgcccgaagccgatcgcgtgcatttcgcgcgcagcattgtcgaccagcaggagcggctgaccgagaccatcgacaagctgctggcactggctgaagtggaacagcacggctggctgcagacccgcgaccggatcgcgctgccggcattgctggccgatgcggccgctgccgcgcaggtgcgcgcacaagcggcaggcgtgcaggtccgcatcggcagcgtgcccgacctgcaggtgcagggcgacggctacctgctgcgacaggcactgcacaacctgatcgacaacgcgattgccttctcgccggctggcgcggagatcgcgctgcaggccgaggtggacgggcagggcgtgcgcctgcaggtggccgaccgtggcgccggcattcccgactacgcgcgtgagcgggtgttcgaacgtttctattcgctggcgcgccccggcagcgggcggcgcagttccggcctgggcctgccgttcgtgcgggaagtcgcgcgcctgcacgatgggcgcgccagtgtcgatgcacgcgacggcggcggtaccgtagccagcctgtggttgccgctgggtacaccgggccagcgctcgcgccgctga

SEQ ID NO: 536261 - DNA, 1320 bp, Stenotrophomonas maltophilia
atgaaatccctgaagatgctgctgcggttcgccattgtcggcgggctgatcctgctgctgctgatcccgctgacgatgatccgcggggtcatcaacgaacgcagtgcgtaccgcgatgaggccttcgcgcgggtggccgacagccgcgccggtgcacagcagctggtcgggccggtgcgggtggtgccgtgggtggagcgcaagcaggttgaactggtcgatccgctgggcgtcaagaagaccgaggtgcaggtcaccgaggggcactggttgcagatgccggcgtcgctggaggtgggcggtgagatgctgccgagccagcgtgaggtcgggctgttcaaggtgccggtctacagctggaacggccagatgaaggcgacgttcgccgaagacgactatccggtgaaggccggccgcagttacggccagccgtatgtagccgtgggcatttccgatgtgcgtggcctggtcggtacgccgaatctgcgcgtggatggcaagcagctgcggctgctgcccggcgtgggcgcggccagcgaagtggggcgaggcctgcatgcaccggtggccggtttcgctgcggatcagggcggcacgctggctgccagcaccgttgaactggagctgcgcctggacggcagccgcatgctgtcggtggtgccggtaggcgacgatacgcatatcgcgctgcgttcgagctggccgcacccgtcgttcagcggggcgttcctgcccaatgagcgacgcgttgatgcacagggtttcgatgcgcgctgggccgtgtcctcgctggcctccgacgcacagcgacagctgcgcaatgacggttcggtcgattcgcaggcggtgacggtatcgctggtcgatccagtcgatgcttacacccaggccgatcgcgcctcgaagtacggtgtgctgttcgtgctgctcaccttcgtcggcttcatcctgttcgaactgatcaagtcgctgcgcatccacccgctgcagtacctgatggtgggcctggcgttggcgatcttcttcctgttgctgatcagcctgtccgagcacatcgcgttctggaaggcctacctggtatcggcggtgggctgtatcggcctgcaggcggtgtacctggccaacgtgctgggccattggaagcgcggtctcggcttcgctgcgctgctgaccgtgctgtacggcgcgctgtatggcctgctggtgtcggagaacaacgcgctgctgatgggttcgctgctgctgttcgtgatcctggcgctggcgatgtgggtgacgcgccgggtcgactggtacgcgcttggcgcggaactgaagtaa

SEQ ID NO: 536262 - DNA, 411 bp, Stenotrophomonas maltophilia
atgggctggcgccagggattgcggcaacgggcacggcagggcattccggccctgctggaagtggatgcactgctgcaggcacatggcgtgctggcggccctgccgggggcacggatcgcccccggcctggtccgcttccagctggctgcggtgacctgcgagggattgcaggggcagggactgcgctggctgcaggacgcgcggcagggacgcggcgcggtggccggccgggtgccgcgctaccggccatggaaggccggggcggaggcgctggccgagatcggcatcggcggcctgccggatgactggccggcacacgcgtcggtgtatggctgcagcagcatcgatcggcggcattggttgttgttgctgccggagcgggcgcagttgtggttggggtggagtgggtga

SEQ ID NO: 536263 - DNA, 1587 bp, Stenotrophomonas maltophilia
gtgttgaagtggggcgtgctggccgtagcgctggcgatgggtggcaatgcaatggcgcagcagcgcgagtcggtggacctggacatggtcagccgcatccgccaggaggccttccaccgttcgcaggtgatggataccttcagctacctcaccgaacgcatcggcccgcgcctgaccaattctccggcgatgggccgcgccaacgcgtggacccgcggcaagttcagcgaatggaagctggacaacgtgcacgacgaagccttcgatgacttcggccgtggctgggagttcacctcggccagcgtggaaatgctgggtgaccgcgtgcagccgctgcatgcgctgcccaaggcctggacgccaggcaccaagggaccggttgagggcgagctggtgcacgtggagatcaagaagcccgaggacatcgaaaagtatcgcggcaagctgcgcggcaagatcctgctgctgggcgaggcgcgcgagtacaagcgcggcaccgagccggactcgcaccggcatgacgccacctcgctggagggcctgcaggaattcaccctgcccaaggacgtcgccgccgagcgggccaagcgggtgaaggaatacaaggaacgccaggagctggccgccaaggtcaacgccttcttcgtcgaagagggcgcgctggccgcgatcagcatcagcagctgggacaacggtatcatccgcgtcgccggcggcggttcgcgcaaggccggcgaatcggtgggcatcccggaactggcgatgatcgccgagcacttcaatccgctggtgcgcgcgctggatgccaagcagccggtacgcctgcgcgtggatgtagccgcgcgcttcaccgacgaggctgaccagcccggctacaacacgctggccgagatccgcggcagcagcaggcccgacgaagtggtgatgatcggcgctcacctggattcctggcacagcggcaccggcgcggctgacaacgcggccggcgtggcggtgatgatggaggcgatgcgcatcctcaaggccaccggcgccaagccgaagcgcaccatccgcgtggcgttgtggagcggtgaggagcagggccttatcggctcgcaggcctatgtggccaagcacttcggtcgtttcccggaacccaccgacccggcccagaaggcgctgccggcctcgctgcgcgagccgaccggtgcattgcagaagacccgcgactacagcaagttccaggtctacttcaacatggacaacggctcgggccgcttccggggcatctacgcgcaggaaaacctggcggcgatgccgatcttcgaagcctggctggcgccgttccatgacgtgggcgccaccaccgtggccacccgcaacaccggcagtaccgaccacatcagcttcgaccgcatcggccttccgggcttccagttcatccaggaccggctggactacttcactaacgtccaccacagccacctggatacctgggaccacgccgagccggaagacctgaaacaggccgccgccatcgtcgcctcgttcgcctacaacgccgccatgcgcgagcagtccttcccgcgcaagcaggaaccgtaa

SEQ ID NO: 536264 - DNA, 1404 bp, Stenotrophomonas maltophilia
atgacctgccgcacccgcttcgcccccagtcccaccggctacctgcacatcggtggtgcccgcactgcgctgtactgctggctggaggcccgccaccgtggcggcgagttcgtgctgcgcatcgaggacaccgatcgtgaacgcagcacccagggcgcgatcgacgccatcctggaggcgatggagtggctgggcctggactacgacgagggcccgatctaccagaccgaccgcgtcgcccgttaccaggaagtggccgagcagctgatcgccgacggcaaggcgtactacgcctacgaaacccgcgaagagctggatgcgatgcgcgaggccgccatggccaggcaggaaaagccgcgttacaacggcgctgcacgcgaactgggcctgccgtacagagacgacccgaaccgcgtcatccgcttcaagaacccgctggaaggtacggtggtgttcgacgacctgatcaagggccgcatcgagatcgccaacagcgagctggatgacatggtcatcttccgtccggacggctaccccacctacaacttcgcggtggtggtggacgactgggacatgggcatcaccgaggtcatccgcggtgacgaccacatcaacaacaccccgcgccagatcaacctgtacgaaggcatcggtgcgccggtgccgaagttcggccacatgccgatgatcctggacgagcagggggccaagctgtccaagcgcaccggcgcggccgacgtgatgcagtacaaggacgccggctacctgcccgatgcgctgctgagctacctggcccggctgggctggtcgcacggtgaccaggagctgttcagccgccaggaactgatcgacctgttcgacgtgaaggactgcaattccaaggcctcgcgcctggacatggccaagctgggctgggtcaaccagcacttcctgaagaccgaggacgtggccgccatcgtgccgcacctggtctaccagctgcagaagctgggcctggacgtggccgccggcccggccccggaggacgtggtgatcgccctgcgtgagcgcgtgcagaccctgaaggaaatggccgaaaaggccgtgatctggtaccagccgctgaccgagtacgacgaagcggcggtggccaagcacttcaaggccggtgccgaggtggcgctgggcaaggcccgcgagctgctggcagccctgccggaatggaccgccgagtcggtgggcgtggccctgcacgacgtcgccgccgcgctggagatcggcatgggcaaggtcgcccagccgctgcgcgtggccatcaccggcacccaggtcagccctgacatttcccataccgtgtacctggccggccgcgagcaggccttgaaacgcattgatgtggccatcaccaaggtagcaacggcctga

SEQ ID NO: 536265 - DNA, 492 bp, Stenotrophomonas maltophilia
atgcccgccaagaccgccactgcctgtacggccccgcaccaccacgtccacgatgcatcggattttgtggcggtggtcgagcgcgtctcgcgcgaacgcgggctgcgcctgaccccgatccgcgccaatgtgctgaagctgatcgccgaggccggcaagccggtcaaggcctacgagctgctggaatgggtgcgcaacggcaagggcgtgggcgctgatgccccgcccaccgtgtaccgcgcgctggatttcctgatggccaatggcttcgtgcacaagctggagtcggtcaatgccttcgtggcctgccaccatcccagcagcgccgcgcattcggtgccgttcctgatctgcaacagctgccacagcgcggtggagctggaagaccgcgaaatcgtcacccagctggagaagcgcgccaaggagctgggtttccagccgcaggcgcagactctggaagtgcacggcctctgcgcgcgctgcgcgggctga

SEQ ID NO: 536266 - DNA, 1149 bp, Stenotrophomonas maltophilia
atgcctcccgtcccgccccgacccgacgacaacgtgacccctccgccgccgaccgacgcggcacctgcgcccacacccgttgagccggcggtcgcgccgaagtacctcaagcccagcgcgcgcagtgtagtggtgatggtggtggtcgccctgctgggcattgcgctgatcctgcgcgcctggcacctgtggccattcaccagcagcgtgatggtgaccgacaacgcctatgtacgcgggcagatcacggtgatggcgccgcaggtgaacggctacgtgaccgaagtgctggtgaaggacttccagcacgtgaagcagggcgagccgctgctgcgcatcgatgaccgcatctacgcgcagcgcgtcgcccaggcgcaggcgacgctggacagcgcacgcgcggcgttggccaactcggaccagtcgcaggcgcagaaccgtgcgcagatcgcctccgcacacgccacgttgtcggccggccaggcggagctgcaacgctcacgcaacgagctgaagcgctacgaggagctggccgcgcagcaactggtgtcagtcaacgaccgcgacaagttccgcaccacccaggcgtcggcacaggccagcgtccagcagtcacaggcgcagatccgcattgccgaggaaaccctggtatcgacccaggtggcgcgcaagagcctggaggcgcaggtggagagcgcgcaggcgcaactggaactggcccgcatcgatctggccaacacggtgatccacgcaccgcgcgacggccagatcagcgaggccagcgtgcgcgtgggccagtacgtcgctgccggttcgcagctgctgttcctggtacctgacacgttgtgggtggtggccaactacaaggaaggccagacctggggcatggcgatcggccagccggccacgttctcggtggacgcgttccaggggcaggtgctgcggggccgcgtgcaggagatcgcgccggctaccggctcggaattcagcgtgctgcgcccggacaatgccagcggcaacttcaccaaggtggtgcagcggctgccggtacggatttcgatcaacgagggccagaagctggcggcacaactgcggcccggcatgtcggtgatcgtgcgggtggataccgcaagcaagccgatggactag

SEQ ID NO: 536267 - DNA, 567 bp, Stenotrophomonas maltophilia
atgactgcccaacgtgccgatgctgctgcccgccgtgccctcatcctcgacgccgccgatcatgtgttcggccaacacggtgtcaccgccccgctggacctggtggtcgaacgcgcccaggtgggccgcgccaccctgtaccgcaactttcccgaccgcaccgcgctgatccaggcgttgctgcaacgcacggtcgaccgcatccggcgccaggtcgaacagctcggcgaccgcgacgatgccctgttcgaggtgttcgagggcatggcccagcgcatcatcgattcacctgccttggccgactactggcgcgcagtggattcggacgtgccggccatgcgtaccgcgcgcgagaccgtgcgcgatctgctggaagcaccgatcgcccgtgccaaggccgccggcctgtgccgtgccgatctggagaagacggacatttcactcatctcgggcatgctgggcgcggccctgcgcggcaagacccgcgacgagcgcgcccacctggccgggcgcgccctgcagctgctgcgcgggggtctccagggagcaaccagcgaggcccgctga

SEQ ID NO: 536268 - DNA, 2205 bp, Stenotrophomonas maltophilia
atgcacgcccgtaccccgcggttgaagccgcattccctcgccctggccctgaccgccctgcttccgaccgtagccttcgccgccagcgaagacgattcccatcgtgaccgccacctgactgaactgtcgtcggtgcaggtcaccgcgtcgccgctgcagggcgacgcagaatcgctggcacgcccggtggaggttctggccggtgaacgcctggacgagcagaaggccggcaccctcggcgataccgtggccaagctgcccggcgtacagagcaccttcttcggtcccggcgtcggccgcccgatcatccgcggccaggaaggcccgcgcgtggccgtgctgtccaacggcatgggcaacatggatgcatccaccgtcagcgccgaccatgccaccagcatcgagccgttcctggccgaccagatcgaagtgctgaagggtccggccacgctgctgttcggcagcggcgccatcggtggtgcggtcaatgtggtcgatggccgcatcgcgcgcgaactgccggagcgcccgctgagcggccgcgcagaactgcgcggcaattcggtgaacaacgaacgcagcggcatgttccgcctcgatggcgtcagcggcaatgtcgtgctgcacgtggatggcctggtccgcaatggcgacgactaccgcatccccggttatgcagtgatcgacagccttgaagatcatcatgaccacgatcacgaccatgacgcggccgagggtgaagaaccgcgtcgcggccgcctggacaacagctcgatccgtacccgcgccggtggcgtcggcgcaacgtggctgggcgacggcggctacttcggcgtatcggccagcacctaccgcaccaactacggcattcccaatggcgcgcacgtgcacgccgatggtgatgatcatggccatgaccacggtcacgaccatggcgatgaagaagaaggcggcgacgagcacgacgtgcgcatcgacatggtgcagaaccgcttcgagaccaaggccggcatctacgacccggtctcgttcctgaagaacatcaacgcacgcgtggcctacaccgactacgaacacgtggagctggaagccggcacgccgtccacccgcttcaccaaccgtggcatcgaagcgcgtctggaagccgtacagcagcagatcggtggctgggacggtgccttcggcctgcagtttggcaacagtgatttcggcgccaagggcgaagaggcgttcgtgccggataccggcacgaagaacatcggcctgttcgtactgcaggaaaagcagttcggcccgttcaagctggaactgggcggccgccacgaccaggtcaagctggacccgaccggtgactaccgccgccgtacgttcggtgccaccaacctgtctgccgccggtatctggaagctcaacgacgccgttgacctgcgcatcggcgtggacagctccgagcgtgcaccgaccaacgaagagctgtatgccgccggcgcacacatcgccacccgctcgctggaaatcggcgacgccaacctgaagaccgagcgcggccagcgcgtggaactgggcatccacacccacagcgagcgcctggacttctccgcgtcggtctaccagaccaggttcaaggacttcatctacctggccgacaccggtgttaccgaaggcctgccggtccgcgcctggacccagcaggacgcggtgttccgcggcgccgaggccgaagcgctggtgcacctgttcgagggtggcgccggtgactgggatctgcgcctgttcggtgactacgtgaaggccaagttggatggcagcggcagccgcaacctcgacatcgccgtgccgcacggcgaccacaaccacaattacaacgtggaactggccaacaccggctacctgccgcgtatcgccccggcccgcgtcggtgccgacctgcgctggtcgaaggacggctggcgcgcctcggtcggtgcggtgcgctacagccgccagaaggacgtcgcgcagaacgaggagccgagcaacggctacaccctggtcgatgcgcacctggcctaccgctgggaccgcaacgccagcaacagctacgaggtcttcctggatggcagcaacctgaccaaccgcgaagtgcgtccgcatacctcgctgctgcgtgactactcgccgctgccgggtcgcggtgtcgcattcggcatccgcgcgttcttctga

SEQ ID NO: 536269 - DNA, 414 bp, Stenotrophomonas maltophilia
atgtccctgtcctcacgcctgcgccacctgctcgaccgtttcggcgccacgggttcgatgctgtgcgcggtgcattgcgcggtgattccggtgctgctggcggcagcgccctcgttgggcctgtcgttctggctgagcgacggcgtggaacaggcgctggtggtgttcgtgaccctgctggggctgttcagcctggtctggggctaccgtcgccacggtgcgctgcgtgcgctgggcttcctgattcccggcctggtggcgttgtgggccggcgtgctgtacgacccgttgcaccataatgcggtgccgcacgcggtggtgatgaccgtcggcggcctgctggtgggtgtggcccatctggtcaacctgcgcctcaaccacggtcacgtgcacgacgccagctgcgcgcactag

SEQ ID NO: 536270 - DNA, 180 bp, Stenotrophomonas maltophilia
atgggtaagggtgaccgcaagaccgccaagggcaagcgctacaacgccagctacggcaacgcccgttcgcacaccgcgagcaaggtcgccgtaggcgccgccgctccggttgccaagaagaccgtggccaaggctccggcgaagaaggctgtggcgaagaagaccgtcgccaaggcctga

SEQ ID NO: 536271 - DNA, 1251 bp, Stenotrophomonas maltophilia
atgacttccgtacgcctgacctgcgcgctggcgctgctgctgccattggccgcctgcaccaccgcgcccaccccttccgcctctgttcccaccactgttgcaacggctgcaccgccgaagctgctgctgatctcgatcgacggcctgcgcgccgatgcgctggatcgcggcctgacaccgaatctgcagcgactgatcgacggcggggtacgcgcgcgctggatgacgccttcgtacccgtcgctgaccttccccaaccactacaccatcgtcaccggcctgcgcccggaccaccacggcatcgtcaacaacagcatggacgatgcaaccctgggccgtttcgaactgagcaaccgcgacgcggtcactaccagcggctggtgggatggcgaaccgatctgggtcggcgccgagaacgtcggcgtgcgcaccgccaccacctcgtggccgggcagcgagtcggaaatccgtggcgtgcgccccagccagtggcgcgtctacgatggcaaggaaccactggagcagcgcgccggcatcgtgctcgactggctggcgcagaccgatgccgatgcaccgcgcctgaccacgctgtacatggaacacgtggacaaagcaggccacaactacggccccgagtcgaaacagtacgccgacgccatcgtgcgcgccgaccagatcgtcggccaggtgctcgatggactgcaacagcgcggcctggtcgcgaccaccaacatcatcgtggtctctgaccacggcatggccagtgtcgccgacggccacgtgatcgccaccgaatcaatggccgatccggccatcgcgcgcaatgtcagccagggccagtcggtaggttttgcgccggtcgcgggccgcgaagcggaagcggaacgcgccctgctcggccgccatacgcactacgagtgctggaagaaggagaacctgccggcgcgctggcactacggcacgcatccgcgggttccggccatcgtctgtgccatggatgaaggctgggacgcccttcaccaggagaagatcgccaagcgcgccaggcaggatcgaggctcgcatggctacgacaacgccctgccctccatgcgcgcggtgttcgtggccagcggtccgtcgttccgccagggcctggtgatcgatggcttcgacaatgtcgacgtctacccgctgctggcgcacctgctgcaggtgccggccgcgccgaacgacggcaatccggaaacgctgaagaacaccctgcgctga

SEQ ID NO: 536272 - DNA, 492 bp, Stenotrophomonas maltophilia
atgaccctgttgttcgatcgtttcgacagcccgatcggcgtgttgaccatcgccggtgacgagcgtggcctgtcgcatgtgctgttcccggaaaaccgccatccggcacgcggccgcgaagactggcactacgccccggatgcactgccggaagcacgcgatcagctgctgcagttcctgcacggcgagcgcaacagcttcgaccttgtgctggcaccacgtggcacgccgttccagctgcgtgtatggcaggcgctggcgttgattccgttcggccagacctggagctacctgcagctggcgcagcacctcggccagcccagtgcgacccgtgcggtcggcgctgccaacggccgcaacccgctgccgatcatcctgccctgccatcgcgtgatcggcagcaacggtgcactgaccggtttcggcggcggactgcaaaccaaggccgcgctgttgcggctggaacaacgccaggcaccgctgttcgcctga

SEQ ID NO: 536273 - DNA, 1479 bp, Stenotrophomonas maltophilia
atggataccgccctcgccctcgacaccgccgcctgcgaccgcgcccgcctggcccgcgacgcacgcttcgacggcgtgttcttcaccgccgtgcgcagcaccggcatctactgccgcccggtgtgcccggcaccgccaccgaagccgcgcaacatcacctactacccgaccgccgctgccgccgccgccgccggctaccgcccgtgcctgcgctgtcgtcccgaactggcgccgcaggcacagcaggcattggctgggcagatcgtgcagcgcgccctcgccctgatccatggcggcttcctgcaggagcagcccgttgccgacctcgcgcagaagatcggcctcagcgcgcgccagctgcagcgcctgttcgttgaacacctgggcgcgacgccggggcagatccacgccacccatcgcctgctgctggccaagcagctgctgaccgagaccacgctgccggtgaccgatgttgcgctggccgccggctacaacagcctgcgccgcttcaataccgccttcctgcagggctgcggcatggcaccgacggcactgcgtcgccagcatcagccgccggccgccgatgacggcggcctggtactgcgcctggtgtaccgtccaccgctggatttcccgcgcatgctggccttcctgcgcaagcgcagcctgcccggcatcgaactgatcggcgaagacagctaccagcgcgtgctcggcacacccgagcgccccaccctgctgcgcgtcaccgccgacccgaaacgcccggaactgcgcctgcagctgggcgcggtcgatccgcgcctgatccccgacatcgtgcgccgcgtgcgtcgcgtgttcgatctggatgccgacctgcagcaggtgcatgccgcgctgggcgaggaaccgctgctggcgcgaggcatcgccgaacgtcccggtctgcgcgtgcccggtggctgggatggcttcgaggtgggcgtacgcgccgtgctcggacagcaggtcagcgtggccgcggccaccaccttcgcgcggcgcctggtcgatgcctatggcgcacacctgccgggcatgccatcggaattcgatcgccagttccccgcgcccgaggtactggctgaggcgccgctggaatcgatcggcctgccgcgcacccgcgccgccaccgtgcgtgcgctggccgctgcctgcgccagcggccagctcgacttcgggcccggtcaggcattggaggaattcgttgcgcgctgcgtggcactgcccggcatcggcccgtggaccgcgcagtacatcgcgctgcgcggacttggccagcccgatgccttccccgccggtgacctggtgctgcagcaggtcctcggccacgcccaaggccagcgcctgagcgagcgtgcgaccgaagcccgctcgcaaccgtggcgcccgtggcgcgcctatgccgtgctgcatctgtggcacctgtccggcaccttcgttggagaaccgacatga

SEQ ID NO: 536274 - DNA, 1164 bp, Stenotrophomonas maltophilia
atgtccgccaaactccgctggttgcccctgttgtgcctggccctggcgggctgcagtcagctggagaatccgggcaatgtgaccgctgccgacaaggcggcgcgggcaccggccagtgatggcgagaacatggtgtcgatcaacgccgccgatgcgccaccgccgccggcgccgccgcgcagccgggcggatcggccgtggccgcaggcgcagctggagaacgggcgtgcgtgggtcagctgcagcaccgaatatgccggtgacgcgggcgacggtgtcgagctggaaggcctgcagcgcgagcagatcagccaggcgctggcgccctgcgccgaacgtggcctgatgcgcgtgcgctacgccggcaagatcaacccgggcttcgccgagatgatgtggcggttggccgtggttgccgaccagcagaagatccacaagcgcatcctcgacctggattccagcgggggccaggtggaatcggcgattgtcgccggtgacagtatcggtgaatccggctggaccatctgggtgcgcgaaggctcgatctgccacagtgcctgcgtgttcgtgctggccgccggtgacaaccgcctgctgtcaggcaaggttggcatccaccgcatgatgcgcatcagctccaaggccacctcgcgcgcagaactcaaccgcgagctgcacgaggtctacgacaacgtaaaggactacctgcagcgcaacggcgtggcggtgggcgtggctgatctgatgatgaccgtgcccaaccgcagcctgcgcctgctgaccgcggacgagctgcgccagtacggcctggatggcaccaacgcggtgcaggacgatctggaacggatcaagcagatgcgggcctgcggcgatgatttcgtgcagcgcaaggacgcgttcctgatcgccttcgaccagcagtgcaagcgcgaaggcgccgacatggaatcgatcaacagctgcggccaggcactgaagcagcgcttcggtttcccggatgcagtgtgcccggaagaaagcccgctgtcggagatcgacgtggcaacgctgccgccggcaccgtcggagccgccgccggtggccgaacaggcgccggcagattccggcacgcctgccgcgcaggccgatgccgccacggtggaaggcagcgccaacgcgcgctga

SEQ ID NO: 536275 - DNA, 546 bp, Stenotrophomonas maltophilia
atgaagcgcgtgctcctgctgctgtccctgctgcccctgaccgcattggcgcaggcacctgcgccggccacgcccgccccggcacccgcgcgcccggcaccggcctcgccagcggctgcaaaaccggctaccgccgacgctccggtgttgaccgccgcgcagcaggcgcaggtgcagaaacaggacgcggaaatgggtgcggccgcagtgaaggcggcgcagctggtggatgccaaccgcgcaggcgaattgtgggacggcgcttcggccgtcgcgcgacgtgcggtaccgaaggccgccttcgtcagccagttgaccagcgagcgctcgcgcctgggtgcgttggccggccgcggccagccgaccattacccgggtcaagtacagcgccggcgctgcggtgccggaagggttgtacatcaacgtcagcttcccgacccgtttcgccaacagcgcgcagccggtgcgcgagctggtctcgttccgtttcgacgaggaccaggtgtggcgcctggccggttacagcctgcgtgcgtcggcaccctga

SEQ ID NO: 536276 - DNA, 390 bp, Stenotrophomonas maltophilia
atggcaactgaactgacgatgctggcctggtcggtgctgctgggctttgtctacattttcgccacctccaccgtggtcacccgcgagcgcgggatgaagtggaatgcttcggcgcgagatggcgaagcgaagccggtcagcccgctggccggtcgcctgcagcgggcccaggccgacttcctggaaaccttcccgttcttcgccgccgccgcgatcgcagtggtcgtggctgggcgcggcaacgacaccaccgcgctggccgcgcaggcctacttctgggcgcgcgtggcctacttgccgctgtatgccgcaggcgtgccctacgtgcgcagcctggtgtggctggtgtcgctgctgtcgatcctggcgctggtgttcgcgttgttgtga

SEQ ID NO: 536277 - DNA, 1179 bp, Stenotrophomonas maltophilia
atgcgcaggatggacgtggtggtggtcggcgccggaccggcaggcctgtgcttcgcgcgcgcgctggccggcagcgggctgcaggtcgggctggtcgaagtgcagccgcgccaagccttggccgaagccgccttcgatggccgcgagatcgcgctgacccatgcctcgcggcagagcatggagcagctggggttatggcagcgcctgccgcacgccgaagtcgctgaactgcgcgatgccaaggtgatgaatggtggctcgccgttcgcgctgaccttcgccagcagccaggtcgacggccagccgctgggctggctggtgcccaatcatctgatccgccgtgctgcatgggatgccgtgcagggccaggacggcctggagctgttcgacgggcgcaaggtgcagggcgtgcaggccgatgcacagggccatgtggtcaaactcgatgacggcagccaattgcatgcgcggctgctggtggccgctgacagccgcttctccgccacccgccgcatgctcggcatcggtgcgcagatgcgcgacttcggcaagtcgatgctggtgtgccgcatgcaggtcgagcgcgaccatcaccacactgcctgggaatggttcggctacggccgcacgatggcgctgctgccgctcaacgagggccaggcgtcggcggtgatcacgctgccgccgcggcagattgaagaactgctggcaatggatgaggtggccttcggtgaggccatcagcggttgcttcgaacatcgcctgggccgcatgcagccggtggccacgccgcaggcgtatccgctggtaggtgtgtatgcgcaccgctttgtcggcgggcgttcggcactgatcggcgatgccgcagtcggcatgcacccggtcaccgcgcatggcttcaacctgggactggccagcgcacagcggctggcgcagggcatcgtcgagcagcagcgtcgcggtgccgacatggccgcggccggcatgctggccagctaccagcgcggtcaccggctggcgtcgcggccgctgtacgaggccaccaatgcgatcgccagcctgtacaccgacgatcgccgtccggcgcgcctgctgcgggcggccggcctgcgcctggcgcagggcgtagcaccgttcaggcagctgattgcctcgcacctgacccagcgcgtggcctga

SEQ ID NO: 536278 - DNA, 222 bp, Stenotrophomonas maltophilia
atgcagattctcgaattcgacctcgacggtgactacgtcgaactcaagcagttgctgaagctggccgacctggtcaccagcggcggcgaagccaagatggtcatcggtgacggccaggtgcgggtcgatggcgaagtcgaactgcgcaaggcctgcaagatccgcgcaggccaggtggtcgaattcgccgacagccagatccgggtgctggctgccggctga

SEQ ID NO: 536279 - DNA, 1947 bp, Stenotrophomonas maltophilia
atgtcccaagattcccaagcgccgctgcagtttgcgcagctcggcctgtccgagcccgtgatgcaggcggtcaccgccatcggctacgaaaccccgtcgccgatccaggccgccaccatcccggcgatgctggaaggccgcgacgtgctgggccaggcccagaccggcaccggcaagaccgccgcgttcgcgctgccggtactgtccaacatcgacctgcagcagatcaagccgcaggccctgatcctggcaccgacccgcgagctggccatccaggttgccgaggcgttccagtcctattcgtcgaagatcccgggcttccgcgtgctgccggtgtacggcggccagccgtacggccagcagctgtcggccctgcgccgtggtgtgcacatcgtggtcggtacccccggccgcgtgatcgaccacctggaccgcagcaccctggacctgtccgagctgaaaaccctggtgctggacgaagccgatgaaatgctgcgcatgggcttcatcgacgacgtcgaagccgtgctgaagaagctgccggagcagcgccaggtggccctgttctcggccaccatgccgccgcagatccgccgcatcgcgcagacctacctgcaggacccggtggaagtgaccatcgcggccaagaccaccacctcggccaacatccgccagcgttactggtgggtgagcggcatgcacaagctggatgcgctgacccgcatcctggaagtcgagccgttcgacgcgatgatcatcttcgcgcgtaccaaggccggcaccgaagaactggccagcaagctgcaggcccgtggcctggccgctgccgccatcaacggtgacatgcagcaggcccagcgtgagcgcaccatcgccatgctgaaggaaggcaagctggacatcctggtggccaccgacgtggccgcccgtggcctggacgtggagcgcatcagccacgtgctgaactacgacatcccgtacgacaccgaaagctacgtgcaccgcatcggccgtaccggccgtgccggccgcagcggcgaggcgatcctgttcgccaccccgcgcgagaagggcatgctgcgccagatcgagcgcgctacccgccagccgatcgaagagatgcagctgccgagcgtggaggcggtcaacgacacccgcatcaacaagttcacctcgcgcatcagcgaaaccctcggcgccggtggcctggacttctaccgccagctgctggagcgcttcgagaacgagcagaacgtgcccgccatcgagatcgccgccgcgctggcaaagctgctgcagggtgacaccccgttcctgctgcagccgccggtgcgcgccccgcgtgaagagcgcgcgccgcgcgagcgcttcgaccgtggcgaccgtccggagcgtggcgatcgattcgaccgcaacgagcgtggtccgcgctttgagcgtggcccgcgtcgtgacgacgccgaaggtggtttcgagcagcgtccgcgccgcgaggttccgccgcgtggtgcaccggagcagggcatggagacctaccgcatttcggtgggccaccagcatggcgtgaagccggccaacatcgtcggcgccattgccaacgaagccggactggaaagccgcttcatcggccgcatcgacatccacgacgacttctcgctgctggacctgccggcgcagatgccgccggacgtgctgtcgcacctgcagaaagtgtgggtgtccggccagcagctgcagatgcgtgcgctggccccgggtgaagacaccaacccggccccgcgtccgttcaagccgcgcttcgacaagcgtggtccgggcggcccaggtggcccgcgtcgtggtggtccgggtggtccgggtggccacggcggcgaccgcggcggtgaccgcgacagccgcccgccgcgtcgtgacggcttcaagccgcgcggtccgcgcagcttctaa

SEQ ID NO: 536280 - DNA, 2424 bp, Stenotrophomonas maltophilia
atgggtagaagtggcacggaccagcagagccggcgggtgccgatgacccgtggcctgggattgcgctttgcgttgttgacgggcatggcgatcgggttggtcgcgctgtccgccttgatccaggagctgcaggcggcctccaccgcatggatcgccggccagggctactggtcgcgtggtcagcaggatgcgaccgccgcactcagccgctatctggcgcgcggtgatgcccaggacctggacgacgcgcgccaggcgctgcggattccgttgggggatctgcaggcccggctggcgctggaacaggcggtaccggacgaggagaaggccaggcagggcttcctgcagggcggcaacgcgcgcgccgatattccgcgcctggtgttctcgttccgctatgcacgcgacatcggtgcattccgggaagcaagcacgctgtggcgacagaccgatgatgacctgttggccgtgcagcggctggtcgccgagctgcagtcggggcatgcccagggggcgctgccagtggcggaccgcgaccggtacctgcagcagctgcgtgatctggaccggcggttgcaggtgcaggcacaggcattttcccaggcgttgctgcgcatggccacgatggtgcggatcgccacgcttgtggtcggtgggctgtcggtgctggcgatcagcctgatggctgtcgcgctggcgcgccgcgtcggcaaggacctgaccgagcacgaaagccgcttccgtgcggccttctaccaggccaatgtcggcatgctcaagctcgacaccgacggcaaggtgatcgaagccaaccaggcgatggccgatatcctcgactaccgacgcgacgtgctgctgcagatgtcgctcggtgatctgttgatggaaggcgaactggtcatcgatggcgtcggccgcattgactgggaccggcagctgcggccgagtgagctgcgcttctgccgccgcgatggcagcctggtgtgggggcgctggagtggcaccggcgtgcgcagcgcgggaggtggcctgtcggtgtttgcgatcatcgaggatgtcagccagaaccatgccctggcgcgcgagatcgaacaccacgccagccacgatccgctgaccggcctgatcaaccggcgcgaaatcgagcggctgctggaacgttcgctgctgcaggtgcgcagcgacggcggcacgcatgcgctgtgctacatcaacctggaccacttcaagctggtcaacgacagcttcggccacgccgccggtgaccagatgctgcgcagtttcgccgactatctggtggctgcagtgcgtgacggtgactgggtcggccgcctgggcgccgatgagttcgccgtgttcctcgcccatgccgggcaggacgaggccaagcgggtgctgcagcgggtgatccgcaacctgggccaggccacgttcccgatcagcgagggcagcccgcagctgagctgcagcatcggtgtggttgaagtcagcgccgacgcccccgatgcgaactggctcatgagtgctgccgacagcgcctgctatgccgccaagcaggccggtcgcaaccgggtgcactgtttcaatgagaaccgcatggcgctggaggagcgccgccgggaagccgagcggttgcagggcgtcagcctggcgatggccgagaaccgcatgctgctgtatgcgcaacgcatcgcccgcgtgggcgatccgacctacctgcactacgaagtgctggtgcgcatgcgcggcagcgatggcagcctgcacctgccgggccagttcatgccggcggtggagcgctatggcatggccgtggcgctggaccggcacgtgctcggcctgctgttccgccacctgcaggtgtgcccggcacacgtccggcagctgggcctgtgcaacgtcaacgtgtcggcgcagtcgatcgccgagcccggcttcctcgccttcgtctgcgacctgctcgagcgcaaccgcgcgctggcctccaagctgtgcttcgagatcaccgagactgcggcgatcagcaacctcacccaggcccgtgcattcatcgatgcggtcaaggcgcggggctgccggatggcactggatgacttcggctccggcctgtcttctttcggctatctgcgccagttgcctgcggacatcctgaagatcgacggcgccttcgtgcgggacatggatactgatccagtcagccacgccacagttcgcgcgatcagcgagctcgggcgcgagctgcagatggaagtggtggccgagtgggtggagaccgccgaggttgccggtgcgctgacccggcttggcgtgcagggcctgcagggctatgccatcgaacgcccgcagccgctggagcggctgaccctggccgatctgcgcccggtgcggctggtcgcggtgaaggggccgccgggggctggctga

SEQ ID NO: 536281 - DNA, 1665 bp, Stenotrophomonas maltophilia
gtgggcggcaggcagtggcagtacggaacgggagcggtgctggtcgtactgctggcgtggttggcgacgccgtggccgctgcaggccgcagcggtggaatcggggcgcgattacctgctggtcggtggcgccaccgatgagcccaccccgcatcgtgcgtgcacgccgcacatgctgtcgggcccgcgccagcaggtgctggtgacggctccgcaggaaggctggtcgggccagccacaggcgctggacgtgttcaatgtctttgccggcgaagtgcgggtacagcacggtgaccgcgaaatctgcggcaacatgcacgacgcccgcacccgtgattcgcgcttccgtgcaggcatcggcctggtggccgtaccgccggccggcagccatgagccgttcctggtttcctggcagacaccgctgaagacacgttgggtaccgaccctgcggctgggcgcgcccagcccggtgcagcagaacgacaccgcccgcctgctgatgcgtgctgcctgcatcgccgtggcgatcgcactggcgctgtcggcgttgatggccttcctgaccacgcgcgatcgcagcttcctggtttacgtcgcgggcaccacggtactggtgctgtggcaggcgatcctcggtggcctcagcggctacccggaaccgtggctgccggtgggggagcgtggggcctggtggctgctctcgctgaccgccgccacgcaggcgctggtactgccggcactgtggcggctgaacggcggtgaccgcgtatggccacggtcgcggccgctgcaggcgaccgtgctgtggggcctggtggcgctggccgtcctggtgccgtggctgcgctgggaacagctggcctgggtcgcgcagggcctgcaggtgtcctatctgctggggtgtggcctggcgttgctgatgggcgtatgggcacgttggcgtggcaaccgttggtcgcaggcaggactggccgcattggcacccatgctggtcctgatcatcgccgatgtctgccgtgcggaatggttgttggagtaccgggtcgaagcactgcagctggcggtgacctggctgctgatgatggccgcctatgccatgaaccagcggctgggccgactgcgccagcagcgcgatgaactgcgtcagctggccgaaaccgacggcctgaccggactgccgaatcgccgcgccggcctgcagcagctggcccgtcacctggcacaggtcgaccgtgagcgtggcccgctggtgatcggcttcctcgacatcgacctgttcaaggagatcaacgaccgccacggccatgccgtgggcgaccaggtactggtggcggtggcacgcgcgctgcgcgctgcggtgcgcagccaggacgaagtggtgcggatgggcggcgaggagttcctgctgctgatgcccggcatgccgcgcgaggcggcatcggcgcggctggaccgcctgcgccagcgcatcaccgaggccgggcaggccctgcaggtgccggggctggaagtgaccgccagcatcggcctggcgcagtggcggcctggcgaggacgatctggccgggctgttgcggcgggccgaccatgccatgtacgtggccaagcgcgccggccgcaaccgggtgttcgacggtgaagagctcgatccgcccggcctggcatga

SEQ ID NO: 536282 - DNA, 723 bp, Stenotrophomonas maltophilia
atgaccacccgactcaacaaacatatcgccgacaccggcttctgctcccgccgcgaggccgatcgcctgatcgccgcccgccgggtcaccgtcaacggccatccggccggcactggcgcggtggtgggcgacgaagaccaggtgctggtcgacggccagccactgcgcgcgcgcgtggcccgcaagcccggcgcccgccgccatgtctacattgcgctgaacaagccggtgggtgtcacctgcacgaccgaaacctcggtcaagggcaacatcgtcgatttcgtcggccacgagcagcgcatcttcccgatcgggcgcctggacaaggaatccgaaggcctgatcctgatgaccagcaacggcgacatcgtcaaccagatcctgcgtgccgagaacggccaccagaaggagtacctggtggcggtcaacaagccggttaccgatgagttcctgcgcggcatggcgcgcggtgtgcgcatccacgaccagatgacgttgccgtgcaagacctcgcgcatcgccaagttcggtttccgcatcaccctgcagcagggcctgaaccggcagatccgcctgatggccgccgaattcggctatcgcgtgacccagctgcgccgcgtgcgcatcgacaacatcaagatcggcgcgttgaagccgggccagtggcgcaacctgaccgagcaggagctgcagggcctgttgccgaagcagctggactggtaa

SEQ ID NO: 536283 - DNA, 1071 bp, Stenotrophomonas maltophilia
atgatcaagcccgacaagcctgccaatgaagcccttcggctcgaggcgctgtaccgctaccgcatccttgattcgcaacgcgaaaaatcattcgacgacctggtggcgatcgccaaggcggtctgcggtacctcgatggcggcggtgaccctgatcgatgtcgagcggcagtggttcaagtcgatccagggcatcgacgcggcggagaacctgcgcagcgaatcgatgtgtggccatgccatcctgcagccgcaggaaatcatggtggtcgaggacgcgttgcaggacatccgcttccacgacaacccggtggtgaccggtgacccgcacatccgcttctacgccggtgcgccactgatcagttccgatggcctgccactgggtacgttgtgcgtgttcgatgcacatccgcagcacctgcccagcgacaaggccgaggcactggccgctctgtcacggcaggtgatgctggtgatggagctgcgccgtttcgcgctcgacatccagaagcacatgctggaacgcgatgactacgagcgcctgctgtcggagtaccaggacgtactgctggcgcagaatgccgacctggccgagcagagccgcaccgatgcgttgaccggactgcccaaccgccgcgcgatggcggcggcactggaagaggcggtggcggagatcgatgggcagccgggactggcctgcgtggccttgctggacatcgatcacttcaagcacatcaacgatttccagggccacgccaccggcgaccgggtgctggccgagctgggcgtgctgctgcgctcgcactttgccggccgtggcatggccgcgcgctatggcggtgaggagttcgtggcggtgatgccgggcaccgatctgcacacagccgaactgcaatgcgagttcctgcgcctggccgtggcagaccttccgctgggtttcccggtcacgatcagcatcggcgttgcccagcaccaggcaggtgaaagcgtggatgacatgctggcgcgcgccgacaatgcgctgtaccgggccaagggcaacggtcgcaaccgggtggaacgggcgggctga

SEQ ID NO: 536284 - DNA, 1161 bp, Stenotrophomonas maltophilia
atgctgcagaccctggccatcgcccactatcgttcgttgcacgggctggtcctgccgctgcagcagttgaacgtggtgaccggtgacaacggcagtggcaagtccagcctgtaccgcgcgctgcgcctgctggcggagaccgcacagggcggcgttgcggcggtgctggcccgcgaaggggggctgggttcggcgctgtgggccggccccgaatccatcgatcgccgggtcgcggccggcgagatcccgctgcagggtggccctcggcaggcatcggtgggattgaagctcggcttcaccaccgacgaattcggctatgccatcgacctgggctacccgccgcccagccattcggcgtttgcgctggatccgcagatcaaggtggaggcgatctgggccgggccgttcctgcgcagcgccaacctgctggttgatcgccgtggggcaatggtgcggcaacgtcatgcgcgcggctgggatctcgtggatgaccggttgtcgctgttcgacagcctgttcacccaggtcggcgatccgcagcgcatgccggaaaccatcgccttgcgtgagtacatccgtcgctggcgcttctacgaccatttccgcagcgatgccgatgccccggcgcgacaaccggcgatggccacgcgcacgccggtgctgcatcacgacggccgggatctggcggcagcctgggtgaccattctcgaaatcggagatccggtcgcgttggcacgcagcgttgacgatgcgttccccggcgccacggtcggcttcgaagagctggacggtcgactggccctgcgcttccaccagccggggttgctgcggccgttgtcgatggccgaactgtccgacggtacgctgcgcttcctgctgctggctgctgcgctacacacgccacgcccgccgccgctgctggtgctcaacgagccggagaccagcctgcatccggacctgctgccggcgctggcgcggctgatcatcgcggccagtgcgcgcagccaggtgtgggtggtgtcacacgccagccgcttgatcgcagcactggagcaagcgcccggctgtcattcgctgcacctgcacaaggaacagggccgcacgctgctgagcgggcagggcctgctggatgcgccggcatggcactggccgcagcgttga

SEQ ID NO: 536285 - DNA, 948 bp, Stenotrophomonas maltophilia
atgagcacacccgacacccgcaaagcgctgtggcagatccatttctgtgtcctgctgtggggcgtcaccgccatcctcggcaagctgatcaccctgcccgcattgccgctggtatggtggcgcatgctgctggtgacggcgatgctggccctgctgccacgggtgtggcgcgggctgcgtaccctgcccctgcggctggtggccggctacgccggcatcggcgcgctggtcgccctgcactggctgacgttctacggtgcggtgaagctggccaatgcctcggtggccgccacctgcatcgcgctggcgccggtgttcacctcgatcatcgagccatgggtggccaagcggccgttccagctgcgtgaactggcgttcggcctggcggtgctgccgggtgttgcgctggtggtcggcggcgtgcccgatggcatgcgcctcggtgtgttgatcggcgcgatctcggcgctgctggtggcagtgttcggctcgctcaacaagcgcatggtcagccacgcggatccgctcacggtcaccgcactggagctgggtgcgggcaccctcaccctgaccctgctggcaccgctgatgccctacctgctgccggcgctggccagcccgctgtgggtggttccgggcctgcacgacggcatcctgctgctggtcctggccgggttctgcacgctgctgccgttcgcccttgccctggtcgcgctgcgccacctgagcgcctacacggtgcagctggtgaccaacctggaaccggtctatgcggtggtgctggcggtgctgctgctgcgcgagcagcacgaggtcaccccgtggttctacctgggcgtggcgatcatcgtcggcgcggtgttcctgcatccgctgctgaaccgccgcaagccggtgcagcatccggaaatccttggcacggccgaggcacgcaacatcgccgattga

SEQ ID NO: 536286 - DNA, 819 bp, Stenotrophomonas maltophilia
gtgaccgccgcagcgatccgctgcggcatcggcggctgggtgtttcccgaatggcgcggcggcgttttctaccccgtggacctgccgcagcgtgaagaactggcccatgccagccgggccctgcgctgcatcgaaatcaacggcaccttctaccgcacgcccaccgcagcacagtgcgcgcagtgggccgcgcagacgccggaaggcttccggttttcgatgaaggcaccacgccacctggtgcagcgccgcgacctgtccagcacggtggaggcagccgcgcccttcctgcaggccgcactcgcactcggcgaccggctgggccccctgctgtggcagttcgatccgcggcatccggccgacgccggagcgctggaacggctgatggcgcagctgcccaagcagctgggcggcgtgccgctgcagcacgccctggaagtccgcaatgccgaggcgcatggcccggcactggttaccgccgcacgcgcgcatggcgtggccgtggtgatcgaggacagcgacgaggcgcccctgcacggcgatgtcagcgccggcttcgtctacgcacggatcaagcgcagccaagcccgcttgaaggagggcctgctggcgcccgtgcagcagcgctgggccgaacgggccaggcgctggtcgcgcggcgagccggtggacgacctgccctgcctcgcagggcccgcccctgaaagcccgcgcgaggtctacctcctgtgcatcggcgcaggcaaggcgcgcaacccggcggcagcgatggcgctgcagcggcaggttgaccagagcagtcattccacacgcgggtag

SEQ ID NO: 536287 - DNA, 444 bp, Stenotrophomonas maltophilia
atgggcgggaacggccaaccgagcaacggctccaccatcattccgtgcctgcgctatcgcgacgcgcaggccgccatcgactggctgcagcgcgccttcggcttccatgcccaggctgtctacgccgatggcgatacggtgttccatgcgcagctgaccttcggcagcggcatgatcatgctcggctcggccgacaaggaaagcgcctggagccagcatgccgcgatgccggacgaggtgggcggccgccagacccagagtgcctgcgtgatcgtgaccgatgccgacgcccattacgcccgggccaaggccgcaggcgcccgcatcgtcatcgacatcgccgaccaggactacggcggccgtggctatgcctgcgccgatccggaaggctacctgtggtggttcggcagctacgatccgtggcgcgcggaccacgaccagtga

SEQ ID NO: 536288 - DNA, 1533 bp, Stenotrophomonas maltophilia
gtgctgctggcgtgcacgaccatggcgagtgctgccaccccggcgcagctgcaggacctggatgcgaccgtcgagcgcgtgcgcgcgcagttcgacgtgcccggcattgccgtggccgtggtcaaggatggcgaggtggtgctggagcgcggctggggcgtgcgtgagcagggcaagccggaaccggtgcaggccgatacgctgttcgccattgcttccaacaccaaggcgttcaccgccacctcgctgaacctgttggccgaggacggcaagctgaagatggacgacaaggtgatcgaccacctgccgtcgttccgcatgtccgacccgttcgtgaccgggcagatgacgatccgtgacctgctgtcccaccgcagtggcctgagcctgggcgctggtgacctgctgttctggccgaccacgtcctacagcaatgccgaagtggtggagcggttgggcagagtgccgctgaagggcggtttccgcgaaagctatgcctacgacaacatcctgtacgcggtcgcccagcaggtgatcgagcatgtctctggcatgagttaccagcagttcctgcagacccgcatcttcgacaaggtgggcatggccggcacgcgctacaacgccgatcacctgaagcccggcgacaaggccgcggtcggccacgccaagtacgatttcaaggacctgcgcaccgttgcgccgctgacgtcgaacaacgccggcgccggtggcatctattccagcgcgcatgacatggcgcgctggatgaaggtgcagctggccgaaggcaaactggccgatggcacgccgctgttcagtgaaaagagccagcagcagatgtggcggatgatcaccccgcagtcgatcccggcgccgagcgtgccggagctggcaccggcgcgagccaatttcgccggctatggcgaaggctggagcctgagcgattaccgtgggcagaagctggtctggcacaccggtggctggccgggcatggtctcgcggctgaccctggtgccgggcgagaagctgggcgtggtggtgctgaccaaccaggaagtgggcgcggcgttcaatgcgatcaccctgagcgtgctcgatgcctatctgggcggcgagaagcacgactgggtggacgcctatgccaaggccgtggccaagggccaggacaaggccgacgaagcctgggccaagcaccagagcgcgcgcgacaagggcagcaagccgtcgctggcactggccggctacaccggcaccttccgtgaccgctggtatggcgacatgcagatcagtgccgagggcaagggcctgcgcctgcgcttcatgaagaccgcgcagctgagcgggcgcctggagcactggcagcacgacaccttcatcgtgcgctgggacgaccgttcgctcaacgccgacgcgttcgtgaacttcagcctggacccggacggcaaggtacgcgaggtgcgcatgcagtcgatctccgacctgaccgatttcagcttcgatttccaggacctgctgttcaccccggcaacgtaa

SEQ ID NO: 536289 - DNA, 1833 bp, Stenotrophomonas maltophilia
atgttccgttggtttgaatccctgattccggtgttcccgcccgtggacgggcgcatgccgccgcgcaaggtgctgccgttctacctgcactacctgcgcccggtgtggccagtgctgctggcgaccctgatcgccggcctgctgctggcgctggtggaagtggcgatgttcgattacctgggccgcatcgtcgacatggtcgccgagcagccgggtgctggcttcttcaagcgccacgccaatgaactgggctggatgctgttcatcacggtcatcgcgcggccgatcctggtcggcctgcacaacctgctggtgaaccaggcgatcgtgcccggcctgagcaaccgctcgcgctggctgatgcacaactatgtggtgcggcagagcctgagcttcttccagaacgactttgctggcagcgtggccaaccgggtgatgcagaccggtacctcgttgcgcgagtcggcggtgcagatggtcgattcgctctggtacatcgtggtctacaccggcaccgcgctgtacctgttcgcgcaggccgactggcggctgatggtgccgctgatcctgtggctgctggcctacgtggtgatcctggtctacttcgtgccgcgcgcgaaggaacgggcatggatcgcctcggaagcacgttcgaaggcaatgggccgcattgtcgatggctacaccaacattcccacgctgaagctgttcgcccatggtgggcgtgagcaggcctacgtggccgagtcgatccgggagctggcggtcaagcaccgcgcacagacccgcatcaccaccggcatggacctgaccatcgccatcgtcaacggcttcctgattgccggtacctgcggtctcgcgctgtggctgtggaatggcggccacatcaccgtcggcgcgatcaccctggccaccggcctggtgatccgcatccacaacatgtccggctggatcatgtggaccatcaacggcatcttcgaggacatcggcacggtgcaggatggcatcaccaccatcgcccagccgctgaccgtgcaggaccgcgaggatgcggtgccgctgcaggtgacccgaggcggcgtgcatttccaggacatccacttccattacggtaaaaagggcggtgtgattgccggcctggacctggtggtgaagccgggcgagaagatcggcctggtcggtccgtccggcgccggcaagtcgaccctggtcaacgtactgctgcgcctgtacgacctggaaagcggccgcatcctgatcgacgatcaggacattgcctacgttacgcaggaaagcctgcgccagcagatcggcgtggttacccaggacacctcgctgctgcatcgctcgatccgcgacaacctgctgtacggccgcccggatgcgactgatgagcagctgcgtgcagccgtagccaaggcacgtgccgaagccttcatcgatacgctggtggacgggcaggggcgtcgtggctacgacgcgcatgtgggcgagcgtggcgtgaagttgtccggtggccagcgccagcgcatcgccattgcccgcgtgctgctgaaggatgcaccgatcctggtgctggacgaagcgacttcggcgctggattcggaagtggaagcagcgatccaggacagcctggaccagttgatgggaggcaagacggtgatcgccatcgcgcaccggctgtcgaccatcgcgcgcatggaccggctggtggtgatggaccagggccgcatcgtcgagaccggcacccatgccgagctgattgctgccggtggcctgtatgcgcgcttgtgggcgcggcagaccggtggctttgtggctgccgatcagtga

SEQ ID NO: 536290 - DNA, 1077 bp, Stenotrophomonas maltophilia
atggatagatttcattctccttccattaccttggcggccatcgccctgatggcgatggcgcccatcaatggatacgcaacggatcaagagaatgccgatgcaactcatcttcctgcgatccacgcggtccactcagcccccggcccgcgcatctggcagttcagaaaaggctcttcaacgctgcttgtactgggcacgattcaacccctaagaaggagcctatccatcgatactcgcagcgttgaagcagcaatctcgacgtctgatgcaattctgagccctccgggcgtgaccgtggagcacgatggcggggtatttcgcagcctcattctgtggcccgccatccgcaagctcaagttcctttcaggtagaagaacgcttcgtgacgagctcaccgaagaagagtacacgcgattgagcgatctcaagattctctatggcctgcatgacgcgagcattgagaggatgcgcccaatgtacgcggcttggaaaattcatgatgctgcactgcaattcagtggagcccgagccggtgagccactttctcgagccattgaccgcatggcccgcgatcatgggatcccgatgatcaacgcccgcttcccgatgcgggtgagaggggccagggaaactatccagaattttcacattgactccgtgaaagaccgcaaatgcttctcggatgccacatcaagcctgcggccctggctcgataacctagatgagctaggtcatgcgtgggcagagggagatattgaatcgggcgcgctcctgcatgcccctccatcgccctcccggtgctgggctcgtctgaccaacgacgcgatcgccactacgatgaatattgaccttgatatccagagacgaactcactgggttgcagtgctccgctcaactacttcgcggcacagtacggttttcaccactctgcccttggatgatcttctgcattcaagaggcatggccgcggtactcgtggacgagggatacatccccgatgccagggtgttctttggcgatcagccgcgacctccaaacatcggagcaagtgaaacctcaaatcatccggacgggtga

SEQ ID NO: 536291 - DNA, 978 bp, Stenotrophomonas maltophilia
atgcacgaaagtcaagcacatgagagtcgtcagcctgccccggaggccacctttcggcacagcgtccagacagagcaacagcttggattgaccctttccgatagggaaaggaaagccatcctctccgcatgcgaagtcagcggactcgatatggattcctactacagctggtatcaatcgaaagcctccatcagctcccagttggctgacctttgccgcccgtcactgttggaggcggtccacagcatcgaccgttccgactactcctcaatcgatggaaagctccctgccgacaggggagttgtgatcgcactgccgcatcacggccactatatcctgtctgcggtccgtctgatggagcacattcgccatcggcgtgacatctacatcttctatggcgacccaaagaaccatgcaggcaacgaattgttcgacgacctgtaccaccggctcttcaatcacgccggatgccgcgcgagcatcatccactcgaatgccagagggataggcatagcgcttcgcgcactgaaaaatagagctgcagtcatcatgatgcccgatgtccaccgctttcgcgaagaaacctattgcattccatttttggggcgccccttggacatcatgctgggaaccgccgcaatggcgcgcaaaaccggaagttgcatattgccagccatctccgtcgttgaccgggatcttcgagcaactattactttcggagatgccatcgagcctatacagacgcgagcatcgcttccatctgaagtagctgactactggacgatggctgaagtctatcgtttccttgagcgtgcaatgggacctcaggccatctattggcagtacatcaggcaacacttcatgaaatcctccaagttcccgatgttccaccccgaaacaatcgatgaagcttggcacatgttctccaatgacccgcgaaccaagccacacacgcgttatacggcatgcctggattga

SEQ ID NO: 536292 - DNA, 723 bp, Stenotrophomonas maltophilia
atgactcgcagtcatgacggcatgagccgaatagcacaaagcccagaacaaagccgcatgcgatgcgatggaacattccccttgccaaacgacacatcatcatcgaccgcaatcattgccgcgacgactcgatccaatattaatcgcgctatcgaactccgcagaaggggattgatcaccgagataattggcacagatcccgcttactcgacaacgccatctgacgcgcttcgcaaactggagggtgatgcgggaattcacaccattatcgtgttcagtgaccagcttacatccagccttgacgctcctgtcttgacgtcccaccacgggcagcagcgctacctgcctctggtggaaggagtcctcaacagcatccacgaatttcaaatcatgacaggcacatgcgatgacacgatcacattgccaccctgctcacccatcacttccgttctgcgcactatttcgaaccatctggattccaaccagaagcttggaggagactggctcgcgcaaccagttcagaccaagcgatggcctgctacacggctagccgagagcagattccgtcagcgtgtctttcactcagctctgatgcacatgtactggaagcatcctgacttcaatcccaagcatttcgattggctccatggacaactcaagaacctctaccgcgcatcgcagcgagcaaaggaggtccaggatgcacgaaagtcaagcacatga

SEQ ID NO: 536293 - DNA, 171 bp, Stenotrophomonas maltophilia
atgcacgcatccgcaaccatttcagatccaagcgccgtcgccgcatggatgaaatcatccagcgcaaatgcaagatccctcgacgcagtgtttgaaaccgaggcggacgaaatcaaagtagccgcattcagcagtgactgctgcggatcgaacaattacgaagagcgctga

SEQ ID NO: 536294 - DNA, 1263 bp, Stenotrophomonas maltophilia
atgcaggttcaatcgtgctcaaagactcggatgcacttccgtatctttcgttgcctatcgctggtgacgagccttgtgaccgctgttccagccatggcggacaatggcgaggtgagcggaacacgtgagggctcacttgagcaggtcatcctgctcagccgccacaacctgcgcgcgccggtggtggcgtcgggcgcgctggccaatgccactccggagcgctggccaggctgggacgtgggcgcaggcgagctcaccaccaaaggcggcgtgctggaggtctacatgggccgttacatgggccagtggctgcgtcaggcgcagctgttgccggcttcgggttgcccgcagctggctgacttccacgcccatgccaacagccttcagcgcacccaggccaccgcgcagttcttcgttgccggtgccttcccgggctgtcatgtcgcagtcgagcagcgcatggcgctgggcacgatggatccgttgttcaatccggtgatccacaacagagacacggtcttccgcgagcgcgcactgtcggcaatgcagcgagcgctggccgcatcggaactggcaccggcactgtccgtggtggagcagatcacccgctacccgcagtcggcggcctgtgcggggcacagcgagtgccatctgatgctggccgacacgatcttcaatgcggaaccgggcaaggaaccacgcgcgtccggttcgctggccctggccagcgggttggtcgatgccttgttgatggagcactaccagggcagtggcatcccccgcgaaggctggggccggttgaccaccgaggcgcaatggcaggcgctggcgcagatccgcaaccgctaccaggacatcctgttcggaacgcccgaggtggcgcgcgatgtggccgctccgctgctggcaagagtgaatgcgttgttcgaggacccggcatcgccaaaggtgagcctgctggtcggccacgattccaacatcggttcggtgctggtggcgttgggaatcacggactacagcctgccggggcagtacgagaagacgccgatcggcggcctgctgcagttcgagcgctggcgtgatcgtggggccggtgaagtgcgttaccggttggtgtatgtctatcccacgcgcgagcagctacgtggtgcgatcccgttgaccgacgcacagccgccgggccgggtggagctggtgctgccgggctgcgcgcagtcgggttgcagtgaagcgcagttcaacaacctgttgcattcaccttga

SEQ ID NO: 536295 - DNA, 237 bp, Stenotrophomonas maltophilia
atgaacatcacggactttcttgtaatggacggtgatggagatgaaataggggccgacccccatggcagcaacattgcctttacgtgttttgattgtggatatccggtggtggctgatgcctcggagaaccaacgtgggagcgatgaggattttcccgctgcctgccgcgggtgtggtgtggagtacttcctcgatttgagactggactcgaggaagctgtatatccacatcgtctga

SEQ ID NO: 536296 - DNA, 1809 bp, Stenotrophomonas maltophilia
atgcgcccgcatcttcttgccctcgccctggtcgccgccctcgccggttgccagccggccgacgccccgaccaacgcttccaccccggccaccagccagcaggccggtgacgcggcggtcgatgccgccttcgccgatctgtccaagcgcgccctggacacctggatgcagctgtcgccggtcagcgccacccagatcggcgaccaccgctacgacagcgaactggacgacctgagcgccgccggccagcagaagaccgtggcggcgtacaaggcgctgctgggcgaactggacaagatcgaggtagccaagctgggccgcgagaaccaggtggacgcggcgatcctgcgcaaccagctgcagtcggaaatctggaacgccgaagtgctgcagtccggcaagtgggacccgcagctgtacaacggcatcgccggcagcgcgatctacggcctgatggcccgcgagttcgcgccgctgccggagcgcctgaagtcggccaccgcgcgcatggaaaagctgccggcgatcttcgcccaggcccgcgagaacctggatccggcccgcgtgccgaagatccatgccgagaccgtggccaagcagaacaagggcatcctcagcatcgtcgataccttcatcacgccgcacatcggtgaactgccgcaggccgaccagcagcgactgcaggcggccatcgacggcctgaagaaggcggtggacgagcagcagacctggctggacaagaccctggtgccgaacgcaaagggcgatttccgcatcggtgcggaaaagtacgaccagaagctgaagttcgcgctgagctcgtcgctgtcgcgccaggagatcggtgagcgtgcacgtgccgaactcaagcgcgtgcgcgaagacatgtacggcatcgcgcagactgtgctgaaggacaagccgggtgcgccggaaatgccggcgcagccgaccgacgagcagcagcagaaggcgatcgaggccgcgctggaactggcctacgccgacaagccggcacgcgacaaggtggtcgacgatgccaaggccgcactggagcagtccaccgcgttcgtgcgcgagcacgacctgatgacgctgcccgatgcgccggtggacatcatcctgatgccggaattccagcgtggcgtggccgtggcctactgcgattcgccaggcccgctggacaagaacctgaagaccttctacgccgtgtcgccgattccggacgactggagcgagaagcaggtcgactcgttcctgcgtgagtacaactcgcgcatgatccacctgctcagcatccatgaaggtactccgggccattacctggaaggctggcactcggccaagttcccctcgaccctgcgtgcggtgctgcgttcgggcctgttcgccgaaggctgggcggtctacaccgagcgcatgatgcaggagcagggttacctcaacaacgatccgctgttccacctggtgcagctgaagttctacctgcgcacgatctccaacgcgatcctcgaccagggcgtgcacgtggacaactgggatcgcgaaaaggcgatgcacctgatgacccacgacgcgttccagcaggaaagcgaagcggccggcaagtgggtgcgcgcgcagctgacgtcggcacagctgccgacctacttcgtcggtgcgcaggaacacttcgacacccgcaaggccgtgcaggagaagctgggggacaagttcaacctgaaggcgtaccacgaccaggtgctgtcctacggcgcgccgccggtgcgtttcgcccgccagctgatgctggaccagccgatcgagtga

SEQ ID NO: 536297 - DNA, 357 bp, Stenotrophomonas maltophilia
atggaataccagggaagctgccattgcggcaggatcgcattcactgtacaggccgaggcgccgatcagcgacgtcatcgactgcaactgctcgatgtgccgccgccgcggcagcctgctgtggtttgccccgcgcgaggcgttccagctgaccaccgatccggcggacgtggccacctatcatttcaacaaggcccacatcgaccatcaccattgccgtgagtgcggtgtcgcgccctacagcgaagcggtcgactcgcgcaccggcacgccgatggtggcggtgaacgtgcgctgcgtgccgcaggtggatctggctggtctttcggtgacctcctacaacggagccgcactgtga

SEQ ID NO: 536298 - DNA, 789 bp, Stenotrophomonas maltophilia
atgatcgcagtgccggtgctgctgttggcactggtagcctgcgccaagaacggtgagcgcgcggcagaggcgggcgccaccgcagccgatgccgccgttgcttcgccggaaggcgccttcctggcctacgaacacgacgtgcaggtgcagctggaagcggcgcagatcgcaccccgcatccagcaggtggcgcaggcctgccagagcgcgaagttcggtgactgtgcggtgctgcaggtcgaccagcgcagtggcgagcagcccagcggcgaggtcaaggtacgtatcgcgccgaagggcactgagcccttgatcgcgttggccggtgaggggggcacgctgcagtcgcgcaacacgcgcgccgaggacctcgctcaggcggtggccgatacggcactgaccaaggcacggctggagaaggagcacgcgcggctgctgtcctaccaggaccgcaaggacctgaagatcgaggacctgatggcgatcaccacgcgcctgtccgagatcgaagccggcgtcgaacaggccaacaaggattcagcgcagcaacgtcgacgcatcgatacccagctggtgacgatccatttcgacaccacctcgggccaacgcagccgcagcgaaatcggtgaggcgctgagcgagtcgggcagcatcctcagcaccagcgtggcgttcctgatccgcgcggttgccgcgctgctgccggtggcggtgctggccttgatcgcggcctggggtgtgcgggcgtggtggcgtcgccgtcgtcgcaagctaccgcccaacctctga

SEQ ID NO: 536299 - DNA, 294 bp, Stenotrophomonas maltophilia
atggccatgctgcgactgcgcatcaccggaaccgaagacgacgcccgcgccatcagcgacctgctgctcggcctggacggcatcgaacatgtcgaggaaaccgacgacctgatgccgcacatggacgacgacgattccagttcggccgggctgtccgatgacatcggcccgggcatccacgagctggaagtggaagtcggcaatgaaagcaccgcgcagaaggtgcgcgatgcggtgcaggagctggccctggaactggatgtgttcgtcgagtacgagaccgacgagggctga

SEQ ID NO: 536300 - DNA, 945 bp, Stenotrophomonas maltophilia
atgcagctacgcccttccctgctccccgcactggccgtcttcgcggtcgcggcgcgccatcagaacttcgcccaggccgcgcaggaactgcacctgaccgccagcgcggtcagccaccacgtgcgccgcctggaagaagtgctggaagtacggctgttcctgcgccacgcccgcggcgtgcgcctgaccgccgagggccggcagttggccgacgccgccagcgccgccttcactgatgtcgcggcggtcgcccatcacctgcagccagatgctgacagcgtgccgctgcggatcaccacgctgcgttcgctttcctactgctggctgctgccgcgactgccacgcttcacccaggcctatccgcacgtccgcatcgaactgcacaccggcagcggcctggatcgctatgacgacaatgggccggaggtcggcatccgctacggcctgggccagtggccgggcctgcgtgcacagcacctgatggatgactacctgttcccggtggcctcaccggcattgcccggggtcgaaacactggtcgatccggcgcgcatcgccgggttgccgctgctgaccgatctgtcaccacagggctggcgcgactggttccgccacgccggcgtgcgcccaccgtcgccgctgccgccgatgcacacctttgccgacagcaccgatgcgatgcgtgcagcggtgtatggcatgggcgcggtgctggcgcgcacccacatcgctcaaccctacctgcagcgctacgaggtggtgcgcctgcccggcccggcgctcaaggcgcgctatgcgtatcacgtggtgcatgccgaaggacaaccacccagccccaccgcgcgcctgttcatcgactggttgctggagcaggcgcaggacgaacgcacgccgattccggcattgccggacagcctgctcgggcgcccggccacacgcgcctga

SEQ ID NO: 536301 - DNA, 873 bp, Stenotrophomonas maltophilia
atgaatgcggtcccacaggcggtcgagcgcgactggcgcacaccgctggaattgaccctgctgggcgccatctggggctgctcgttcctgttcatgcgggtggcggtgccgtcgttcggcccgttcgcgctggtcgaggtgcggctggtgctgggcgcgctggtgctgctgccgttcctgtggcgcgcccgcgcgcagttcccgccgcgtcgttggctgtggctggcaccgatcggcctgatcaattcggcgctgccgttcgtgctgttcgcctatgctgccgagcaggcgccggcggcgatcggcgcgatctgcaatgcgatgaccgtgctgttcgccgcgctgatcgccttcctgttcttcggcgagaagattggcatgcgccgcgccggcgccttgctggttggtttcgccggcgtggtggtgctggccaccgccaaggtatccggcctgagtattggtaccgcagtgatcgccggcgctgcggcgtcgttgctgtacgggctgggcgtgaacctggtgaagcggcacatgaccggcctgccatcggccgcggcggcggcagccacgctgtcgtgtgcctcgctgtggatgctgccgatggcggtgacgcactggccacaggccgccattccgctgaaggcctggggtgcagcgatcgccttgggcgtggcctgcaccggcctggcattcctgatgttctatcgcctgattggccgcatcggcccgtcacgcgcgtcgacggtgacgtacctgattccgctattcggcgcggcgtttgcgtggttgttcctgggcgaggcggtgacggtacagatgttggtggcgggggcgttgattctggggagcgtggcggtgagtcagaagggctga

SEQ ID NO: 536302 - DNA, 903 bp, Stenotrophomonas maltophilia
atgccgcaccgccgtcgccttgcactgaccaccctcgccctggcctgcctgctgccctcgctggccagcgcggccgccccgtaccgcagcccgcagcagatcctcgatgcctcggcggccagcgactggcgcacgccggacccggccaacctgctgtacatggacctgcccgccgggcgcgtgatcatcgagctggcgccgcagttcgccccgcgccatgtcgccaacatccagaccttcgcccacgagcacttctgggacagcaccagcatctaccgctcgcaggacaacttcgtggtgcagttcggcgatgccgacgccgatgacgcggccaaggccaagccgttcggcagcgccgcgcgcaagctgccggccgagttcgaacgcgccagcgccggcctgaaggtcaacgtgctgccggatcgcgatggctgggcggcacagaccggtttcgtcgacggcttcccggtcggccaggacccgcaggccggcaagacctggctggcgcactgctacggcatgctcggtgccggccgcagcaacgaggaagacagcagcatcggcgccgaactctatgtggtgaccggccagtcaccgcgccagctcgaccgcaacatcacgctggttggtcgcgtgctgaagggcatggagctgctcagcgcaacgccgcgcggaccggcgccgatgggcttctacaccgacccgaaactgcgcacgccgatcatgtcgatccgccgtgccagcgatgtgccggtggccgagcgcacgccgatccaggtgctgcgcaccgattcgaagaccttcgccgatacggtagaggcacgccgcaatcgcgtggatgatttctacaagcgcccggcggggcatatcgatctctgcaatattccggtgccggtgcggtag

SEQ ID NO: 536303 - DNA, 474 bp, Stenotrophomonas maltophilia
atgactgagttttattattgcgacttctggtttggcgcaaagaagtccgcccgaaacataatcagtgaatccgaagccaaatcgagacatgagagccaggctcgctatacggttctcgttggctcccccaccacgccatccgcgattatcgatgtgctgttggacaaagaaatgattggcgtcgactttctggatgaacatctaagggagcgcctgacgtatcaattccagcaggtagcgccgggaaatctgttcctgagcatggcggtacatagaacgttcgatgagaagagtgacggcattgccgaagggaccagctacctcttcaatgaagatggtcggcttacgataaccagggagaatttttcacctcatcatctggaagagtcttcaactacgcacgatccgacaggcaactatgaacctgttcctgtcttcggccattactccggtctaattgcagaagaaagatag

SEQ ID NO: 536304 - DNA, 366 bp, Stenotrophomonas maltophilia
atgtccgaggacgatgtccacctgaagaagttccagaaggagctcagcgccggaaccgtgtcgctggccctgctggcggtgctggcccgggccggggagccgctgtacggctacctgatcgccaaggagctggagcgggtgggcgagggcgtgctgagcggcaagcagagcgcgctgtacccggtgctgcgcaacctggagggcgccgggctgctggaaagccatgtggagccatccagcagtggtccgccccggcgctactaccgcatcaatgaacgtggccgcgaggtgctggcgcagtggcgccaagcttggcaggccacccgtgattccgtcgattccgtgttggagggggtaccgcaatga

SEQ ID NO: 536305 - DNA, 990 bp, Stenotrophomonas maltophilia
atgaacgacccgagcctggcaggccgagccctgccgaccaccatcccgcagtatctggcgcagctgcgcgcggcgctggaaggtgccgatccggcgatggtgcaggacgcgttgtacgacgccgaggaatacctgcgctcggagctggcggcgcagcccggccgcagcgaagccgaggtcatcgccgatgtggccggcagctatggcgccccggacgaagtggccgagatctaccgcgagaccgaagtgacggtgaaccgcgcgctgcgcacgccgcgtgcggataccacgccggtgctgcgtgcggcggcggaagccagtggcgtcgagccggcctcaccgccgccggcgccggtgcagcgttcgctgctggcgcgtgtcttcggcgtggtgaccgatccgcacacctacggtgcgctgttctacatgctgctgtcgctggccaccggcatcttcttcttcacctgggtggtgactggcctgtcgctgtcgctgggcctgctgatcctgatcgtgggcattccgctgaccgtgctgttcttcggctcggtgcgcgggctggcgctgctggaaggacggctggtggaagcgctgctgggagaacgcatgccgcgccgtccgcgctacaccgaccgcagccgcacgtggctgcagcgcatcggcgacatgttcaccgatggccgtacctggctgaccctgctgtacttcgtgctgatgctgccgttgggcgtggtctacttcaccatcgcggtgacgctgctgtcgctgtcactggggttcatctgggcgccggtggccgcgctgttcagcggtgacattccgggtgtctacatcgatggcgtgaacgtgttgccgatggccgcctcgccgctggtgggcatcgtgatcgcagccgtgggcgtgctgctgctgctgttgacgatgcatctggcacgtggcatcggcaagctgcacgggctgatcgccaagaacctgctggtgcggttgtaa

SEQ ID NO: 536306 - DNA, 1308 bp, Stenotrophomonas maltophilia
atgctctatcaactgcacgaactgacccgcaacctgctcgccccctgggtgcaccaggcccaggccaacgccaagttcttcgccaaccagggccactggtggtcgcagatgcccggcgctgatcgcctggcggcggtcaatgagctgttccatcgcatcggcaaggattacgagaagcccgaatggggcatcaacgaaatcgacgtcgatggcgaacgcgtgccgatcgtggtgcacgaggaagtgagcaagccgttctgcaagctgctgcgcttcaagcgccacagcaatgaagccgaccagctgcatacgatgctcaaccagccgttcgtgctggtggtcgcgccgttgtccggccaccacgccacgctgctgcgcgataccgtgcgcacgctgctgcgcgaccaccgcgtgtacgtgaccgactgggtcgacgcgcgcatggtaccggccagcgagggcgaattcggcctggacgactacattgcgtacatccaggaattcatccgccacctcggtgtcgagcgcctgcacgtggtcagcgtgtgccagcccacagtgccggtgctggccgcggtttcgctgatggccagccgtggcgaaccgacgccgcgcacgctggtgatgatgggtggcccgatcgatgcgcgctgcagcccgaccgcagtgaacaacctggccacgaagaacccgctgtcgtggttcgagaacaacgtcatccacacggtgccggccagttaccccggcgccggtcgccgcgtgtacccgggcttcctgcagcacgccggcttcctgtcgatgaaccccagccgccatttcagctcgcactgggatttctacaccgacctggtcaagggcgacctggaagatgccgacgcgcaccgtcgtttctacgacgagtacaacgccgtgctggacatgccggccaagtactacctggatacgatttccgtggtgttccaggacttcctgctgccgcgtggcgagtgggtggtcaacggcgagaaggtcgatccgtcagcgatccgtgataccgcgctgctgagcatcgaaggcgagctggacgatatcgccggtctcggccagaccgaagccgcgcaggcgctgtgcaccggcatcactgcggaccgccgtgagcatttcatcgtcgaaggtgccggccactacggcattttcagcggccgtcgctggcgcgaagtggtgtacccgaaggtgcgcgacttcttcgccgcgcatgccgaagcaccggcggtgaaggcgacgaagaagaagagcaacgtcaccccgctgcggcgaaaggcggggtaa

SEQ ID NO: 536307 - DNA, 591 bp, Stenotrophomonas maltophilia
atggacaagacctacgacgccgcctacttccaacgctggtaccgccgtgccgacatcggtggcagcgcccgcctggcgcgcaaggtcgccctggccgtggccagcgccgagtactacctggaacgaccgatccgcagcgtgctggacatcggctgcggcgaaggcgcctggcgcgcaccgctgttgaagctccgtccgaaggtcgaatacctgggcttcgacagcagcgagtacgctgtgcgccgctacggccgcacccgcaacctgaacctggccgccttcggcgacttcgcctggctgcggccctgcgccccggtcgacctgctggtgtgttcggacgtgatgcactatgtgcccgaccgcgagctgcgcgccggcctggccggcgtggccgagctgaccggcggcgtggccttcctggagaccttcgccgccgaggacgcgttcgaaggcgaccacgagagcttccaggcccgcccggcgcgctggtaccgccgcacgctggcccggcacggcctgctgccggttgggtcgcactgctggctcggccccgctctggcaggcgatgcggccgcgctggaacggatgtga

SEQ ID NO: 536308 - DNA, 456 bp, Stenotrophomonas maltophilia
atgcagagctactactgggtgaagaccttccacatcgtgttcgtggtggcgtggatggccacggtgttctacctgccgcgcatcctggtgaacctggccgagaccgcaggccagcgggccgtgaccgagcgcctgcagctgatgggcctgcgcctgtaccgcttcggccactcgatgttcggcctggcattcctgctcggcctggtgctgtggctgggttacaaggtcatcccggatttcccgaccatggtcgcgcccggtggtgccggttggctgcatgccaagctggggctggtggtggtgctgctggtgtacttcagctggatcggccgcctgttgaagggcgtggccaagggcagggcgttgccgtcgtcgcgcgcgctgcgctggatcaacgagatcccgctgctggccttcattccgatcgtgtggctggtgctggccaagccgttctga

SEQ ID NO: 536309 - DNA, 960 bp, Stenotrophomonas maltophilia
atgaatccgaactacctcgacttcgagcaacccatcgccgacctggaagccaagatccaggaactgcgcaacgccagtgccgggccggcggtcaatgtcgaggcggaagtgcacgcgctgcaggacaagctgcgcatgcgcaccgcgcagatcttccgcaacctgacctcgtggcaggtgctgcagctggcccgccacccgtcgcgcccgtataccgccgactacatccgcgtcatgttcgatgagttccaggagctggccggtgaccgcgccttcgccgacgacaaggccatcatgggcggcctggcccgcatcaatggccgttccgtgatggtgatcggccaccagaagggccgcgacaccaaggaaaagatcaagcgcaacttcggcatgcccaagccggagggctaccgcaaggccctgcgcctgatgaagatggccgagcgcttcggcctgccggtgctgaccctgatcgacaccgccggcgcctggccgggcatcgacgccgaatcgcgcggccagtccgaagcgatcgcacgcaacctgatcgagatggccgaactgaaggtgccgatcatctgcaccgtgatcggtgaaggcggctccggcggcgcgctggcgctgggcgtgggcgaccgcaccgtgatgctggaatacgcggtgtactcgaccatcacgccggaaggctgcgcctcgatcctgtggaaggacgccggcaaggccaaggaagccgccgagcagctgggcctgaccgcgccgcgcctgaagagcctgggcctggtcgacaaggtcgtgcgcgagcccaccggcggcgcccaccgcaacccgacccagatggccaagcgcctgaaggccgtgctgctgaacgaactggacgcgctggacaagctgtccaccgaacagctgctggaacagcgctacacccgcctgcgcagctacggcacgtacgaagcggcctga

SEQ ID NO: 536310 - DNA, 870 bp, Stenotrophomonas maltophilia
atgaagaccctgctgttcccgattgccgccgctctggccctggccgcctgctcgccgtcgaagatcgagttccagatcgacaacccgaccgacacgccgctggcgctgagcatcgatggcaaggacctgccggtggccgcacagggttcgcgcccgatctcgctcgccgtcggtgagcaccgcctgcacaccgacaaactgggcgacgtgcgcttcatcgtctacgtcgatggccgcggcggactgatcaacccgaccctgagcgagtacgtggtcgcccgcgagatctacgtcaccgacgagagcaagctgaagaacttcggcaccggcaaggccggcatcgagctgggcggcgtcgactttgaaggcccgttcgagaagagccacgaactgttcatcgacaagacctggacctacggcgtgcgcgagcccttcccgaaggaaaaggtggtggcccacgtcgacgccagcggcggccagatcgtggccaaggtgttcaccgcgccggacttcatcgcttacgtggaagaaggcatgggcgagcccggcgcgttcaagcgcgagcagccggccggctacgtgcccccggcgttcagcctggaaccggccccggccagcctgccggcactggtgcctgctttcgaggcgcatgccgcgccgctgcgtgaggtctatgcgcgctggctgaaggccaccaccgccgatgaacagaaggccttgcgcaagcaggacttcgccgcgcagatggccttcacctcggccaccgccagcctaggcagcgggctgggccgtgaggccaacgaggcctacaacgacttcgtttcccagcgcagccagttgatgggccgcagcgcgctggtggtgccctga

SEQ ID NO: 536311 - DNA, 3591 bp, Stenotrophomonas maltophilia
atgtccaactcccgcttcgtacatctccacgtccacaccgagttctcgctggcggactccaccatccgtgtgccggccaaaccggaccaggcggacccgaagaaggccaagcaggccaacctgctgtcgcgctcggtcgagctcggcctgcccgcgctggcagtgaccgacctcaacaacctgttcgcgctggtcaagttctacaaggccgccgaaggcgtgggcatcaagccgatcgccggtgccgacgtgctgatcgccgaggaaggccaggacccgtggcgaatgaccctgctgtgccgcgatcgcgagggctacctgagcctgtcgcggctgctgacccgcgcctggatggaaggccatcgcccggaaggcggtgtggccatccatccggactggctgaaggccggcaacgccaacctgttcgcgctggccggccggcagagcctggccgggcgcctggcgctggacggcaagcatgagctggccgagcagcagctggccgactggcagcgcgtgttcggcgacggcctgcacctggaacttacccgtaccggccgcgagggcgaggaaaccttcaaccagttcgcgctgatggcggccggccagcgtggcctgccggtggtggccagcaatgatgtgcgcttcctgtcgcccaccgatttcagcgcgcacgaagcgcgcgtgtgcatttccaccggccgcgtgctggacgatcccaagcgcccgcgcgagtacagcgaccagcagtacctgaagtcggccgaggagatgtgcgcgctgttcgccgacatccccgatgcgatcgacaacacgctggcgctggccgagcgctgcaacatcgagatgcggctgggcacctacttcctgcccaactacccggtgcccgacgacgagaccctggacacctggatccagaagatgtcgcgcgacggcctggaagagcgcctggagaagaatccgctggcgccgggcaagacccgcgaagagtatttcgagcgcctggagttcgagctcaacaccatcatcaagatgggcttcccgggctacttcctgatcgtggccgacttcatccagtggggcaagaaccagggcatcccgatcggcccgggccgtggttccggtgccggttcgctggtggcgtgggcgctgaagatcaccgatctggacccgttgccgtacaacctgctgttcgagcgcttcctgaacccggaacgcgtgtcgatgcccgacttcgacatcgacttctgcatggaccgccgcgacgaggtgatcgactacgtcgcacgcaagtacgggcgcgagcgcgtcagccagatcatcacctacggcaccatggccgccaaggcggtggtgcgcgactccggtcgcgtgctcggcttcccgtacggcctggtcgacggcgtttccaagctgatcccgaacatcctgggcatccacctgaaggatgcactgggcaagggcaaggaaggccccagctcggaaatggcctcgccggaactgatccagcgctacgagaccgaggacgatgtccgcgacctgatcgacctggcgctgcagctggaagacctgacccgcaacgccggcaagcatgccggtggcgtggtgatcgggcccgagccgctgagcgagttctgcccgctgtatgccgaacacgacgagaacgggctgggcaagaacccggtcacccagttcgacaagaacgacgtggaagaagtgggcctggtgaagttcgacttcctcggcctgcgcacgctgaccatcatcgactgggcggtgaaggcgatcaacaagcgccacgagcgcgccggcattccgccggtggacatcgccgcgatcccgctggacgacacgcccacctacaaggacatcttcgccaacggcaacaccggcgcggtgttccagttcgaatcctcgggcatgcgccgcctgctgaaggacgcgcgccccgaccgtttcgaagacctgatcgcgctggtgtcgctgtaccgccctggcccgatggacctgattccttcgttcaacgcgcgcaagcacggccaggaagaaatcatctatcccgatccgcgcaccgaagccatcctgaaggacacctacggcatcatggtgtaccaggagcaggtgatgcagatggcgcagatcgtcggcggctactcgctgggcggcgccgacctgctgcgccgtgcgatgggcaagaaggtgccggccgaaatggccaagcaccgcgagatcttccgcgaaggtgcggccaaggacggcgtggacgaagccaaggccgatgcgatctttgacctgatggagaagttcgccggctacggcttcaacaagtcgcacgccgccgcctacgcgctggtcagctaccagaccgcgtggctgaagcgccattacccggccgagttcatggcggccacgctgtcgtccgacctggacaacactgacaaagtggtcggcttcctcgacgaggtgcgcaacctcggcctgaccgtgctgccgccgaaggtgaaccagtcggccttcatgttcgaagcggtcaccccggacacgatccagtatggcctgggcgcgatcaagggcgtgggccagggcgcctgcgaagcggtggtcgaggaacgactgaagggaggccccttcaaggatctactggacttctgcacccgcgtcggctcggccaagctcaaccggcgcacgctggaagcgatgatcaactgcggtgcgctcgatgagctcggccgcaaccgcgcctcgctgatgctgcagctgccggaagtgatcaaggccactgatcagatggcacgcgagcgtgcgtccggacagaactcgctgtttggcgggcccgacccgagcaccgtttcgatccagctggacctgccagaagccgaagaatggccgttgctgcagcgcctcaacggcgagcgcgacacgctgggcttctacctcagcggccacccgttcgatccctggcgcgacgatgtgcgcgatctggtaggcaacgacctgggttcggtggagaaaatctggagcgccaacagcggtggcggcggtggcggcgagaagcgctggcgcccggaggtgcagaccgtgctggcaggccaggtggtcggcgtgcgccgcaagggcgaaagccagatcttcatccagcttgaggatggccgcggccgcgtcgagtgcagtgcgttctccgatgcaatggccgagttcggccacctgatgaccaaggaccgcatcctggtggtcaagggcggcctgcgcgaggacgagttcaacggtggctacgcgctgcgcatccgccagtgctgggacttcgacgaagtctgcgccaactacgccacgcggctgtcgctgcgcctggacctgcgccagcagcgcccggtctgggagcgcatcaatgccctgctcgaccgccatcgcccggggcgcacgccactgcgcctggacctgctgctgaagggtccgcagggtggcatcgccggcatgcttgatgtgtccgggcaaagcgcggtacgcattgattccaagctgatggaggcgctgcgcgccgacccggccgtgcgcacgctgaaagtgcgctacagcccaccgtgggccagctga

SEQ ID NO: 536312 - DNA, 636 bp, Stenotrophomonas maltophilia
atgagccgccgccacgccgcagcggccagcctggccctgttcgatggcagcgcggtaatcgagccggaacgcctggttgccggcgtcgatgaggccggccgtggtccgctcgccgggccggtggcggtggcggcggtggtgttcgacccggcacggccacgcatcaacggcctggacgattccaagcagctcaccgcggcgcgccgcgagcagctgcatgaccgcatcatcgagcgcgcccttgcctggcacgtggtgctggtggacgtggacaccatcgaccgcctgaacatctaccaggccaccctgcagggcatgcgcgatgtcgtcgccgcggtcgcccacgtggccggcttcgcgcgcatcgacggcaacgtggtgcccaagggcctggtactgccggcgcaggcgctgatcggcggcgatggcatcgaccgcgcgatcatggccgcatcgatcctggccaaggtctcgcgcgatcgctacatgcaggacgtgcacgcccgccacccgcagtacggcttcgagcaacacaagggctatggcaccccggcccacctggccgccctgcgcgagcacggcccctgcatggagcaccggcgcagcttcgccccggtacgtgagtgcctcggttga

SEQ ID NO: 536313 - DNA, 1260 bp, Stenotrophomonas maltophilia
atgagcagcacgaccggccaggcgccggccggcgccgctgtgattccgctggcctcgatgaccggcagcgtccccgcgcaacgggtgctcagcgagcgcccgttgcggatcgccctggtcgccggtgaggcctccggcgatctgctcggtgcgggcctggttcgcgaactgaaagcgcgcttcccgcatgccgagttcgccggcatcggtggcgacgccatgcgcagcgccggctgccagacctggcacgatgccagcgaactggcggtgatgggcctgaccgaagtactgcgccatctgccgcgcctgctgaagctgcgctcggcgttccgccagcgtgcgctggactggcagccggacgtcttcatcggcatcgacgcccccgacttcaacctgggcatcgagcgctggctgaagcagcgaggcgtgcgcaccgtgcattacgtcagcccctcggtctgggcctggcgtgagaagcgagccgagaagatcggcagcagcgccgacctggtgctgtgcctgttcccgatggagccgcccatctatgccaagcacggcatcgacgcgcgcttcgtcggccatccgatggccgacgacattccgctgcagggcaaccgcgaggaagcgcgcgccgcgcttggcctgccgacttcggccaaggtgctggcggtgctgccgggcagccgcctgggcgaaatctcgcgcctcggcgaacccttcttcgaggctgcctggcaggtctccgaacgcatcccaggcctgcacgtggtggtgcctgccgccaaccccgcctgcaagcgcctgatcgaagagcagctgtcacgctcggcgctgccggtcgcgtactcgcatgtgctcgacggccaggcccgcaacgccatgatcgccgccgacgtggtggtgctggcgtccggtaccgcgaccctggaggcgatgctggtgaagcggccgatggtggtcggctaccgtgtcaacgaactgacctaccgtctggtcaaggcattcggcctgatcaaggtcgaccgcttcgccctgcccaacatcctggccgggcaggacctggcaccggaactgatgcagcacgactgcacgccggacaagctggccgcggccatccagcagtggttcgaccacccacaacgggtaaccgacctgcaggacacctatgcacgcctgcatgagcgcctgcgccgcaatgcttcggcacgtgccgccgacgccgtcggcgagctgctgatgcgcgaccaggcccaggcatga

SEQ ID NO: 536314 - DNA, 792 bp, Stenotrophomonas maltophilia
atgactgacaacgcaccgcggatccacccgaccgccgtcatcgacccggccgcgcgcctggccgatgacgtccaggtgggcgcgttcaccctgatcggtgccgatgtggaaatcggtgccggcacggtgatcggcccccattgcagcatccacggcccgacgaagatcggccgcgacaaccgcttcatcggccacgcagcggtcggtggcgaaccgcaggacaagaagtatgcaggggagcgcaccgagctggtgatcggcgaccgcaacgtgttccgcgagttcgtcacgctgaaccgtggcaccggcggcggcggcggcatcaccagcatcggcgacgacaactggatgctggcctacacgcacgtggcgcatgactgccatgtcggcaacttctgcgtgttctccaacaacaccaccctggccggccatgtgaccgtgggcgactacgtgatcatcagcggcttcgccggtgcccaccagttctgccggatcggcgcgcatgccttcctcggcatgggggcgctgaccaatggcgacgttccgccgttcaccatggtcggcaccgattcgctgggccgcccgcgcggcatcaacagcgaaggactgaagcgccgcggtttcgacgccgagcgcatttccgccatcaagcgtgcctaccgcaccctgtacgtggcgggcctgccgctggccgaagccaaggtgcagctgaccgaacaggcgcgtgacagcgatgacgtgaaggccatgctggacttcatcgagcacgccgagaggcccttgctgcgatga

SEQ ID NO: 536315 - DNA, 459 bp, Stenotrophomonas maltophilia
atgaacgacacgctgcagcttccgatcgacgtctgccagatccaggaactgctcccgcaccgctatccgttcctgctggtggaccgggtgcttgagctcgacatcgaggccaagcgcatccttgcgcagaagaacgtcagcatcaacgagccgttcttccagggtcacttcccgggccgcccgatcatgcctggcgtgctgatcatcgaagcgctggcgcaggccggtggcgtgatgacccagctcacgctcggccgtgactcgcagtccaagctgttctacatggtcaaggtggaaaacgcccgcttcaacaagcaggtcgtgcccggcgacgtgctgatgctggatgtgcagatgaagcgcctgatccgcaacatgggctggtactacggcgaagccaaggtcaacggtgaagtcgttgcctcggccgaagtcatgtgtgccggcgccaagggctga

SEQ ID NO: 536316 - DNA, 1023 bp, Stenotrophomonas maltophilia
gtgaatactcccacctacaccgcccagcaactcgccgagcagttcggcctgcaggtccatggcgaccccgccaccgccatccatggcgtggctaccctcgcccatgccggtcctggtcagctgaccttcctcgccaatccacgctaccgcgcccagctggccgacagccaggcctcgctggtggtcctgcgtgccgacgacgccgaggccgcccccggcgccgcgctcgtggccaaggacccgtacaccaccttcgccaagatcgccgcgctgttcgatatcgcgccaacgcgcccgccgggcatccaccccagcgccgtcatcgatcccagcgcccaggtcgccgccagcgcccatatcggtcccttcgtctccgtcggcgcgcgcagcgtggtcggtgagaactgcatcatcggcactggcagcgtgatcggcgaagactgcagcctggacagcggctgcgagctgatcgcgcgggtcaccctggtcacccgggtcaagctcggcaagcgcgttcgcgtgcatcccggcgccgtactcggcgccgatggcttcggcctggccatggacgccggcaagtggatcaaggtgccgcagctcggcggcgtgcgcatcggcgacgattgcgaaatcggcgccaacacctgcgtcgaccgtggcgcgctggaagacaccgtgctggacgaagacgtgcgcctggacaacctagtgcagatcgcgcacaacgtgcagatcggcgcgcactcggccatcgccggctgcaccggcatcgccggcagtgccaggatcggccgctactgcctgctcggcggccacgtcggcgtggtcggccacctcgagatctgcgacaaggtcgtgatcaccggcaagtcggtggtccgcaattccatccatgagccgggcgagtactcgtccggcaccccgttgaccgacaaccgcacgtggcgcaagaacgccgcgcgcttcaagcagctggacgcattggctcgccgcgtcctggctgctggcaaggagaaagaatga

SEQ ID NO: 536317 - DNA, 2364 bp, Stenotrophomonas maltophilia
atgacgcgactccccaatcgccgcctgctggccctcgccctcgccgccgtcaccggcgctcccgccctggcccaggcagccgagcccttcactgtcagcgacatccgcgtggatggcctgcagcgcatcagctcgggcacggtattcacctacctgccggtggagcgtggcgagacggtcaccgacaacaaggtcggcgagaccatccgcgccctgtacaagaccggcttcttcgaagacgtgcagctggaccgccagggcagcatcctggtggtgaccgtcaaggaacgcccggcgatcaacaagctgaccgtgaccggcaacaaggacatcaagtccgagcagctgctcaagggcctgtccgacatcggcctgaccgagggcggcaccttcgatcgcctgagcctggaccgcgtgacccaggaactgcgccgccagtacaacgaccgcggcaagtacaacgtcgagatcaccccgacggtgagcccgctggaccgcaaccgcgtggacatcgcgatcgcgatcaaggaaggcaaggcggccaagatccgtcacgtcaacctggtcggcaccgagaagttcgagagcaaggacatcctggagacctgggagtccaaggagcacaattgggcgtcgtggtaccgccgtgacgaccagtactccaaggaaaagctgtccggcgacctggaaaagctcaattcctggtacctcgaccgcggctatgtcgacttcagcattgattcgacccaggtgtcgatcagccccgacaagcgcgacatgttcctcaccgccggcgtgaccgaaggtgcgcagtacaagatctccgagatcaaggtcagcggcgacacgatcctcccgcaggaggacgtcgagcgcatggtgatccagaagtccggcgacacgttctcgcgtgcgctgctggaattcagctcggacaccatcaccaactcgctgtcgaacatcggctatgcgttcgccaaggtgaacccgatcccgaccaccaaccgccccgagcagaccgtggcgatcaacatgcaggtcgtgcccggccctcgcgtgtcggtgcgtcgcatcctgttccgtggcaacacacgtacgtccgacgaagtgatgcgtcgcgaaatgcgccagttcgagaacagctggtactcgcaggccgcgatcgaccgctccaagatccgcctgcagcgcctgggctacttcgagtcggtggacgtggaaaccccggccgtcagcggcagcaacgaccaggttgacgtcgtctacaacgtcaaggaaaccacgtccggcagcttcgtgttcggcctgggctactcgcagtcctacggcatgaccacgtcggtgcagctgtcgcagaacaacttcctcggcggcggcaaccgcgtgtcggtcgaagcctcgcgcagcagctacctgcagcgctacggcttcagctacaccaacccgtacttcaccgatgacggcgtgtcgctgggctacaacctgtcctggcgcgagctggactactccgacttcaacaccgcgcagtacaacagcaccaatggttcggcgcaggtggtgttcggcgtgccgatcaccgagaccgataccgtctcgctgatgttcggcatcgacagcaaccagatcaccacctaccagggctcgaccccgcagtcgatcatcgactacatcaacgccgtcggtaagcgcacgttccatgcctggcgcaccgagctgggctgggcgcgtgactcgcgcaacgactacttcatgccgacccgcggtacctaccagcgcatcggcctggaaaccacgctgccgggttcgaccatcgagtactacaagctgaactaccagatcagcaagtactggccgatcatgccgtcgctggtgatcaacacccgtgccgaagtgggctacggcgatgcctatggcaacgactacacccgcacgctgaccaacccggacggcaccacccgtacggtgaccgccagcggcctgccgttcttcgagaacttctacgccggcggtaccaactcggtgcgtggcttcgaagacaacaccctcggcccgcgcgaagtcaccaatggctatccggaaggccagccgctgggtggttcgctgaagaccgttggttcggtcgaagcctacttcccgcgcctgttcgacagcccgtcggcacgtgtgtcagccttcgtcgacttcggcaacgtttacaacggcgtggacaacttcaaggccaacgaactgcgcgtgtccaccggtgtggccctgctgtggcgcgccccggtcggcccgatctcgatcagctacgccttcccgctgaagaagaaagacgatgacaagatcgaacggctgcaattcacgttcggtggccagttctga

SEQ ID NO: 536318 - DNA, 1359 bp, Stenotrophomonas maltophilia
atgactgacttcatcggatcggtctggtggatgatcgtcagcctcgggctgctggtcacgttccacgagttcgggcattactgggtcgggcgcctgtgcggggtcaagatcctgcgcttctcggtcggcttcggccggccgctgtggtcgcgccgggacaagcacggtaccgagttcgccatcgccgccatcccgctgggcggttatgtgaaattcctcgacgaacgcgaagtcgaagtccacccgcacgagcgcggccaggccttcaaccacaagaccgtctggcagcgcatcgccatcgtcgccgccggaccgatcgccaacctgctgctgtgcatcctgctgctgtgggcgatgttcgtgatcggcaagcaggattattcgccgaccatcggccgtgtcagcggcatcgccgccagcgccggcctgaccagcggcgaccgcgtgctgcgcgtggacgagcgcccggtgatcaccctcggcgaggccagcatggcgctgaccgccgcagcgatggaccgccgcgacgtgacgctggaagtgctggacccggccgatcaggtgcgcgtgcgcaccctgccgctgtcgcagctgccccccggtttcgatgaacgacgcgtgccgatcctggctggcctttactggcagtcgtggctgcaaccggcacgggtcgattcgctcaccgcggactccgtggtggccgggcagctgcagccgggcgatctgatcgtggcgatcgacggccagcgcatcgacggtgccgaccaggtcatcggcgagatccagacgctgggccgcgctggcggcccgggcatgatcgaggtcctgcggggcggcgaacgcctggcgctggaagtcaccccgcgccagggcaaggattccaagggcgagccgatctggcagatcggcgtgcagttcccgacctcgttcagcccgccctatgacaccctgctgcgctatggcccgctcgacgcggtcaccgtggccgtgcgcgaaacaggccgcctggcggccgattcgctgggcatgatgggccgcatcgtcaccggcaaagcctcgctgcagaacgtttccgggccagtgaccatcgcccgcgtggccaatgtttcagccaaacgcggcctggactggttcctgcagttccttgccctgctgtcactcagcctgtgcatcatcaacctgttgccgatcccgatcttggacggcggccacctgctgtattaccttatcgagttggtcaagggcagcccgctgagcgagcgtgccatcgccgccggccagtacatcggcctggcgttgctggccgggttgatggggttggcgttctacaacgacatcctcggcctggtcccgcgatga

SEQ ID NO: 536319 - DNA, 1191 bp, Stenotrophomonas maltophilia
atgaatgctgtcgcagacctgcgccgggtcgccgtgttcggcgccaccggctcgatcggtgcctccacgctggacgtgatcgcccgccacccgcagcgctatcaggccaccgtgctggccgccggccgccaggtgcaggcgctgctggcgctgtgccgccagcacaagcccgcgcacgcggtgatcgccgacgcatcactgttcgccgagctgcgcgacggcctgcgcgatgccggactcgccaccgaggcgcatgccggccatgccgcgctggaccagctggccgccagcgatgcctgcgacaccgtggtcgccgccatcgtcggtgcggccgggctgtcttccaccctggccgcggccgccgcgggcaagcgcatcctgctggccaacaaggaatcgctggtgctggccggtgagctgctgacccgcactgccgaacgtgccggcgccgaaatcatcccgatcgacagcgaacacagcgcgatcttccagtgcctgcgctcgcgcgacgccagcattgacggtgccggtgtgcgccgcatcctgctgaccgcctccggtggcccgttccgcggccgcagccgggccgcgctggcccaggtcaccccggcccaggccgtggcccacccgaaatggtcgatgggcccgaagatctcggtcgattcggcgacgttgatgaacaagggcctggaagtgatcgaggcccaccacctgttcggcatccccggtgagcgcatcgacgtgctggtgcatccgcagagcctggtccactcgctggtcgagttcgtggacggttcgaccctggcgcagatgggcctgccggacatgcgcaccaccctggccgttggcctgggctggccacaacgcatcgaatcgggcgtggcggggctggacctgctggcccagggccggctggatttcgaggcccccgacaccgacgccttcccctgcctggccctcgcctggcaggcgatgcaggccggtggcaccgcgccggcggtgctgaacgctgccaatgaagaggccgtttcagcgtttcttcagggccgaatcggtttcctgaccatcccggaactggttgctaacgctctttcaacactgccgacccagccagccgatacactggaggtcctgttgtccgccgaccagcgggcacgccagctcaccctgaacgccatcgacgccgcctga

SEQ ID NO: 536320 - DNA, 837 bp, Stenotrophomonas maltophilia
atgaccaagacccgagtccttgccgcgctgatcatggcgccggtcgccattgccgcgatcctgctgctgccgacccaatggttggcagcggcggcggctgcggtgctgctgatcggcctgtgggagtggctgaagctggccggcatcgaagacaccctggcacgcaccgtgctgctggtgctgaacctgctgctgatggtgctgctggtctgggccgatggcagcacgctggtgctgttccagataaccaccctggccggcgtcgcctggtggttggcggcgctggtctggcttcgcttcttcaatttcggcgcgcaaccgtcggcaccctcgcgcatcgtgaagatgctggctggtacgctggccatcgttccggcctgggccgcgctggtgctgatccatgctggcggcgatccgccgggcaagcagggccacctgtggctgctggctgccctggcactggtctgggcggcggattcgggcgcctatttcgccggccgtcacttcggcaagcacaagctggccccgcgcatcagccccaacaagacatgggaaggcctgttcggcggcctgctggccggtgtcgccgtggccgtcggcctgggctggctggccggcatcgataccgcacatctgccgggcctgctgatcacctcggtggtggccgtgttcgcctcggtactgggtgatctgtttgaaagcctgatcaagcgtcacgccggcgccaaggactcgggccacctgattccgggccatggcggcgtgctcgaccgtgtcgacggcgtcttggctgcagtgccggtgttcgcactcggcaaggaaatcttcgggttctga

SEQ ID NO: 536321 - DNA, 768 bp, Stenotrophomonas maltophilia
atgccttcagtcccacctccattgccggccgccctgccccgccacattgccatcatcatggatggcaatgggcgctgggcacagcagcgccgtcgtccgcgcgtgatcggccaccgggccggcgcgcgtgcggtcaaccgcaccatcgagcgctgccttgagctgggtattccggcgctgaccctgttcgcgttctccagcgaaaactggggccggccgcaggaagaagtcgatgcgttgatgaagctgttcctcggcgcgctcgaccgcgaagtggacgagttgcatcggcgtggcgtgcgcgtgcgcttcatcggcgagcgcgaacgcttcggcgccgggctggtcagccgcatgcagctggccgagcagcgcaccgcggacaacaccacgttgaccctgtcgatcgccgccagctacggtggccgccaggacatcgcccgtgccgcgcgcgcactggccaccgaggtcgccgccggccgcctgctgcccgaacagatcgacgaatcgctgctgggcagccaggtcgccctggccgacttgccgccaccggacctgttcatccgcaccggtggcgacacccgcatcagcaacttcctgctgtggcagctggcgtacaccgagctgtggttcaccgaggcgctgtggccggacttcgatcccgctctgctgcagcaggcgctggacgcctatggcagccgtgagcgtcgtttcggcctgaccagcgcccagatcgccgcactggccaccgagacttccagcccatga

SEQ ID NO: 536322 - DNA, 555 bp, Stenotrophomonas maltophilia
atgctcaacgacatcaagaacaacgcgcagacgcgcatggccaagagcatcgacgctctgaagcacaccctcacctcgatccgcaccggccgcgccaccccggccctgctggaccgcgtcacggtcagcgcctatggcaacgccagcaccccgctgaaccaggtcgcatcgatctccaacgccgacgcccactcgctgctcgtcacgccgttcgacaagagcatgatcaaggagatcgaaaagggtctctacaacgccgagttcaccccgaacacgctgggcaccgcgatccgcatcaacatgccgccgccgaccgaagagcgccgcaaggagctggtcaagcaggtgcagaaggaaggggaaggcgccaagatcgcgatccgcaacatccgtcaggacgcgaacaaggaaatcgccaagctggtcaaggacaaggcgatcagcgaagacgagaagaagcgcggtgaagacgacatccagaagttgaccgacacccacatcaaggacgtcgacaaggtcgttgccgacaaggaaaaagaactgctgtcggtctga

SEQ ID NO: 536323 - DNA, 729 bp, Stenotrophomonas maltophilia
atgtccaagctcgcctatcgccgcatccttctgaaactatccggggaggcgctgatgggagatgaggactacggcatcgacccgaagatcatcaaccgcctggcccgtgaggtcatcgaagcccagcaggcaggcgccgaagttgcgctggtgatcggcggcggcaacatcttccgcggcgccggcctggccgctggcggcatggaccgggtcaccggcgaccagatgggcatgctggccacggtcatcaacgctctggccatgcaggacgccttggaaaagctgggcgccaaggcccgggtgatgagcgcgatcaagatcaacgacgtgtgcgaggactacatccggcgccgcgccatccgccacctggaaaagggccgcctggtgatcttcgccgccggcgtcggcagcccgttcttcaccaccgactccggtgccgccctgcgcgcgatcgagatcggcgccgacctgctgctgaaggcgaccaaggttgacggcgtgtacgacaaggacccgaacaagcatagcgacgcggtccgcttcgacagcctgagctacgacgaagtgatccgccgtggcctggaagtgatggataccgccgccttcgcactggcccgcgacagcgacctgccgatgcgcgtgttcgacatgggccagccgggcgagctgctgaagatcctcagcggcgagaacatcggcaccctggtccagggccgcgacccggcctga

SEQ ID NO: 536324 - DNA, 1539 bp, Stenotrophomonas maltophilia
atgcctcccgagctgacagctgccctggcgctctgccgcaacctgccttcgccacccggtattgccctgcgcatcatcgaactggcacaggacccggaagcggacatcgccaccgccgccgacatcatcgccatcgacatggcgctgagcgctcgcatgctgcgcatcgccaattcgccgctgtacgccagtcgtcgccgcatcgagaacctcggccaggcactgaccatgctcggcctgaatgccacgatcagccttgccctgggcttcaccgtcacccagggcctgaccggcggcgccggtgccgaccacgacctgcgccagcgcgcgtggaagcgcagcattctcagcgcactggccgccagccagctgggccaggcccgcggcctgcgccgcctggaggaactgatgctggccgggctgctgcaggacctgggcgtgctgtgcctggtccaggccgaatcggagcgctacctgccgctgctgcgcgaagcccgtgacaacacggacctggttgcccgcgagcgcgacgcgctcggctgcagccacgccgatgtcggcgcctgggtggccgagcaatggggcctgccgcgctatctggtggagagcatcagccacagcgaggacgacgacgctgccgattcgccgttccaggcctgcgtgcagctgtccggcgcggtcgccgacatctggctggacgaagatgccgatgccgcccgcgagcgcgccctgcaccaggtacatgaccggctggaactcgacagcgcccgtttcgaccaggtgctgacccgcatcagcgaggccctgccggacatcgccagcctgttcgaggccgggctgaattcgccctcgcgggtccgtgagctgatcgaccacgcgcaggagctggccaccctgcgcaacctgcgcgagctgcaggatgccgaccaggcgcgccgccgcgccgacgaattcgaggcgcgggccaagcgcctggccgaccaggcccaccgcgacgccctgaccggcgtgctcaaccgccgccagctggaggcggtgctggagcaggagttcctgcgcgccgggcgccagggctggccgctgtcggtggccttcatcgacctggacgacttcaagaagatcaacgatgcccacggccacctgaccggcgacgaggtgctgcgcgcctttgccggcaagctgcagggccagctgcgcaacagcgacaccgtggcccgcttcggcggcgaggaattcgtcgcgctgctgcccaataccagcgaaagcgtggccctggacgtgatccgccgggtactggccaacatcgtcgccacgccgatggccgagctggagggaggtccgttgttcgtcaccttctccgccggcgtggccacccagggcggctacgagcgctttgccgacgtgcaggacctgctgcgtgccgccgacgatgtgctgtaccgatcgaagaacctgggccgcaaccgggtgatcgcccgctccccaggcgccctcggccacgacaagctttcagccaccgccggcgccgagctgggctga

SEQ ID NO: 536325 - DNA, 876 bp, Stenotrophomonas maltophilia
gtggaaatcactgcttccctggtcaaggaactgcgcgagcgcaccggcgccggcatgatggaatgcaagaaggctctcaccgaagccaacggcgacatcgacgctgctgctgaagccatgcgcaagtccggcgccgccaaggccgacaagaaggctgaccgcgtggccgccgaaggccgcctgggcctggcccaggatggcggcaaggccgtgctggtcgaagtcaactcggaaaccgacttcgtcgccaacgatgacaacttcaagtccttcgtcaatgccgtcgccgctgccgccctggcatcgggcgccaccgacgtcgaagccgtgaaggctgccaagctggccgatggccgcaccgttgaagaagcccgcgccaccgccgtgcagaccctgggtgagaacatccagatccgccgcatggtcaaggtcgacaccaccggcaacatcggtgcctacgtccacaccaacggcaaggttggcgtactggtcgacctgatcggcggcgacgtcgagctggcccgtggcctggcgatgcacgtggctgccctgaagccgccgcacaacaaggcttcggacgttccggccgacttcgtcgaaaaggaaaaggaaatcgagctggccaagatgtccgaaaaggacaaggccaagccggccgagatcctggaaaagatcatcagcggcaagatcaacaagatcgtcagcgacgtgaccctgtacggccagacctacgtgctgggcgacaccaccgtcgagcaggtggtcaaggccgctggcgccgacgtggctggcttcaagctgctgatcgtcggcgaaggcatcgagaaggtcgtggaagactacgccgctgaagttgccaaggcgatgcaggtctga

SEQ ID NO: 536326 - DNA, 807 bp, Stenotrophomonas maltophilia
atgccccaggtcaccatgcgtcagatgctggaagccggcgtccacttcggccaccagacccgctactggaacccgaagatggctccgtacatcttcggcgcccgcggcaagatccacatcatcaacctggaaaagaccgtcccgctgttcaacgacgcgatgaacttcatctcgtcggttgcccagaagcgcggcaccgtcctgttcctgggcaccaagcgcagcgcccgcgaaaccatcaaggaagaagccgagcgttgcggcatgccgttcatgaaccagcgttggctgggcggcaccctgaccaacttccgtaccgtcaagcagtcggttgcccgcctgaaggaactggaagccggtgaaaccgacggcaccttcgagaagctggtcaagcacgaagtgctgggcctgcgtcgcgagcgcgacaagctggaagcctcgctgggcggcatcaaggacatgaaccgtctgccggacgccatcttcgtgatcgacatcggccacgaagacatcgcgatcaaggaagccaagaagctgggcatcccggtcatcgccgtggtcgacaccaactacaacccggaactggtggactacgccatcccgggcaacgacgacgccatccgcgctgtgcagctgtacgcccgcgccgctgccgacgccgtgctggaaggcaaggctgctgctccgcacgctgcttcggtgcgtgaggaagagttcgctgaagccgctgctgaaggcgaagagaagccggcccgccgcgctccggccaagaaggctgccaagaagggcgacgacgcccaggcctga

SEQ ID NO: 536327 - DNA, 699 bp, Stenotrophomonas maltophilia
atgcgtaccctgctgagcctgctggtactgctgctggcgctgcccgcgtcggcgctggacctggtgccaaccaccctgcagctgccagccgaagggggacacagcgagctgtggctgtacaaccccggtcccggccgctggcagggcgaggttcggatcctggcctgggaacagcaggccgacgcggaaaagctgcggcccagcgaccagatcctggccagccctgcccggctcgacctcccgcccggcacccgccaacgcatctggctgctgccccgggacaggtcgcccattgccgtcgagcaggcctaccgggtgcttctggctcccactgaaccggacctgccacggtactcactgcccttgttcaggggacacgccgtgcccctggcgtggccggagctgcatgccgggatcgaacccggtacgtcacatccctttctgcgattgagcaacgcaggtaccgtacacgcccgcctgcacgatcttgcgttcgtcgccgacgatggccgccgcaccctgctgctgccgggactggccggctacctgctggcgggccgggaacgccgctgggccctccccgcccatgccgacggctatgcccgtggccatttccaggcccggctgcaggacggccgcgtggtcgatctgaccgtgccggacccggcaattgcagcgagcgcaccgagcgggctataa

SEQ ID NO: 536328 - DNA, 219 bp, Stenotrophomonas maltophilia
atgctggtcgccagtacgcccgcgtgggccgatccgggcagtacacccctgcagatccggctgaccgtggtcgagggctgcagcggtgatgccggcaacacccgatgcgcggcaccgcacaagcgcagcgacgcgcccgagcttccgcaacagatccgcgatctcgcgccgccggccgacagcgacgacgcggcgcccgccgtgaccgtcatctactga

SEQ ID NO: 536329 - DNA, 1038 bp, Stenotrophomonas maltophilia
gtgagggtgctgctgctcggcgtgctgctggtcgccggcctgctcgcggcactgccggcccgggcgacagcggtctgcacggcaatcgcgaacccgaccctgccattcggcaacatcaacagcaacgctcccggccctacagcggcaacgctgaacatcacggtgacctgcaccaccgccgcactgagcctgctggccaccaccggcgtccgcgtctgcgtgggtatcggcgccggcagtggcggcggcagcagctccaccttccgcacgatgtccacctccaccagcgacaccatgaacttccagttgtacaacaccgccagctacagccaggccaccggcctggtgccgcgcggcacgccacccgcgcaggaactgaccatgagctacagcgtgccgctgctgaccggcggcagcggtgcgcagtccgtgcaattgttcgcgcagatccctgccaaccagatcctcgcttcgggtgcctacagcagcaccttcagcggcgccaacgtggtgcttacctgggcctggaacgaagtcctgctcggcaccgccaccgtgccggccacctgcaacggcggcgcgaccggcaccaacagcgccagtggggctttcagcttcaccgccactgccaacgtgctgccgcaatgcggcagctacgtcaccaccagcatggacttcggcaacgtcaccggcagcattcccgccaacatcgaccggaccgccacgctcacgctgacctgcctgaagaacactgcctaccagatcagcctcaacaatggccagaacaaccccggcgcctccaccacccggcgcatggccaccaccattggcagcggcacctactacctcccctatgagctgtaccgcgatgccgcgcgcagcctgcgctggggtagtaccctcaacgtcgataccgttggtggcaccggaagtggcagcgcgcagcagctgaccatctatggccgggtgccgccggtcaccggccagcccgcggccggtacctacaacgatctggtgcaggtgacgatcacctattga

SEQ ID NO: 536330 - DNA, 2379 bp, Stenotrophomonas maltophilia
atgggtgcgctgcttgctgccctggctcctgcggcgatccaagccgccgatgtgtccggtgcagcggccaccaccgccgccgatgtatcaggcatctccgccgatgcgatcctgccaccgcccacaccattgaccgccaaccagacgctgtacctggacgtggcgctcaacagcaccccacgcggcctgatgcctttcatcgagaaccgtggccgcctgcaggccagccccgacgtgctgcgccagctcggcttcagcgccaacggcgatgcaccggtgtacctggaccagatcagcggcgcggtggtgcgctatgacgcacgcctgcagaccctggcgctggacgtgccgctggaccagctgaccctgccgactaccgtgctcagccgcccgcagacgcgcgcccctgcaggcagtgcctcacccggactgctgctcaactatgacgtgtatggcagccgggtggatacgctcggcaacctcagcctgagctcggaactgcgcctgttcggcgtcggcaacggcaccttcgaaaacaccgcggtcagccgacgctaccagcagcccggcgatcgtcgctggcgcggtgagagcgtgcgcctggatacgcgctggagcctggatttccccgacaaggcgatgacgctggaggtcggcgatttctacagcggcttcgtcgactggacccgcccggtgcgcctgggcggcctgcagatcggccgcaactacggcctgcagccgtatcgcgtgctcactcccacgcccagcttcctcggccaggccgtggtgccctccaccgtcgagctgtatgtcgacggcctgcgccagtacagcggccaggtcccggtcggcccgttccagctggccgcgcagccaggcatcagcggcaccggcaacgcacaggtcgtggtcaccgacgcattcggccgcatgcagacactggatttcagtttctatggcacccagcaactgctggccaagggactgtccgactggtcggtcggcgtcggccacctgcgccaggacttcggccagcgctccttcgcctacgacgatcgcaccgtggccagtgccagctggcgcggcggcatcagcgataccttcaccggtgaagcgcatgccgagggcggaggtggcctggcccaggccggcatcggcggctggtggctgctgggcgacgccggcgtgttcaacgcggcctacgcgcacagcaaccatcacggcctgcagggcgggcagtgggcactgggttacagctggaacaaccgccgtctcaacgtcaacctgcgcagcgtgcgcagccacggcgactaccgtgacctcggcgcgctgcagggcaacctgccgccgagcatcagcgaacaggccacggtcgggctggatctgctgcggctgggcacgctcagcgccagctacctgcgcctgcgctaccccgatggcgaagacaaccgctatgccagcctgttctggtcgcgcacctggagccagcgctggtcggcctacctgtcggtgaaccagaacctggaccagagtgatgaccgcagcatctatctgtcagtgaccgccagcctgggcaacaaccgccaggccagtctgtccagccagcgcaacggcgacagccagacctgggtggccgacgtcacccagccggtgcccggcgatggcagtgcaggcggcatcggctggcgcgcgcaggtgcgccacggcgaggacggcaacggcggcctggccgaagtcggcatcctcaatgacatcggccgctactcgttcggcgcctcgcgccagggcgggctcaactatgcctacggcagcgccagtggcagcctggtctggatgggcgggcacgcgttcgccacccgcgaggtctcggacgcgttcgcggtgatcagcaccaacggcgtcggcggcgtgccggtgcgtctggagaaccgcctgatcggcgtcaccgatgatcgtggcctgttgctggtcagcccgctgctgtcctggcagcgcaaccgggtctcgatcgacaccctggacctgcccgaggagatgcgtgccgaccgcatcgaggactgggtgacgccgcgccagcgcgccggtacccacgtgacattccagttgcgctcacgtccctctctgagcctgacgcttcagagcatggacgggcagccactggaagtgggcagcgaagtgcagctgcccgatggacgccaggccacggtgggctatgacggcctgctgtacctggaagacatcgctgccggcagcgtgctgtacatcaccaccagccgcggccagtgccgggtgaaggtacccgaccagcccaaggtggtggcgtctggcgcccggccgaagccggcaccgctgcagtgcattccggaggtcgcgccgtga

SEQ ID NO: 536331 - DNA, 735 bp, Stenotrophomonas maltophilia
atggcccgaccccgcccgtggcgcgccaccggcgtggcgctgctcgtcctgagcctggtactcgccgccccggtcgaagccaccagcctgcaggtcgccccgaccagcctgcagctggaagcgcgccagcgcgccggcgagctttggctgaccaacagcggcacctcgccggtgaagctgcaggtgcgggtgttccgctgggtgcagcaggacgggcaggaacaactgttgcccaccgatgggctggtggtcaccccgccgatgcaggaactggctgccggacagcagcagctggtccgggtgatgcgtccggacaggacgccaccgcctgcacagcagcattaccgattgatcgtcgacgaggtgcccgatctggccacccgtgccgaagggatgcagttcgtgctgcgctattcgataccggtgttcgtgcagcccgccgccggcaagctcgcgccgcagctgcaggcccgcctggtgcagttgcccgatggccgcaacggcgtcgaggtggccaacgcgggcaacagctatgcgcagatcgccgatctcgcgctgggtagtgccacgcgcccgcgcatcgtgcatcccggactgctgggatacgtgctgcccgggcaggtgatgcgttggccgatcgagcgcacggcgatcgaccgcgacaacgaccagatcacggccaagctcaatggcgagtcggaacagacgccgctgtcgcctccatcggctcgctga

SEQ ID NO: 536332 - DNA, 531 bp, Stenotrophomonas maltophilia
atgcgatccgcgcttcgttccccgcttgcctgggctttgaccggggttctgctgtccagcccggccctggccgcagacaccaccaccttcaatgtcaccctggtggtcaccaaggcctgcaccatcaccgccgcggcggccaccaacgtcgacttcggcaccgccgcctcgaccacggcgacccccaccctgggccagggcacggtcaccgcccagtgctcggcactgaccccgtacacgatttcactgaatgcaggtgccaacgccagcaccgccaatgacgtcaccacccgccggatgaagaacaccaacgccgcggtgaccgccaacaactacgtcggctaccagctctaccaggacgccgcacacaccctggtctggggtgccacctccggcaccaacacccaggctggcatcggcaccgggctggccgtgccctacatcgtctacggccagatcctgaacctcagtacgaacaacccggcgaccggcaactacctggatacggttaccgccacgatcacctattga

SEQ ID NO: 536333 - DNA, 843 bp, Stenotrophomonas maltophilia
atggcccggatcgccagttgggtggcgttcgttcagattgtggccggatcggcgataatggcggccatgagcgtgaatctgaaaaccccgcaggaaatcgagatgatgcgaatcgctggccgcctggccagcgaagtgctcgacatcgtcaccccccacgtcaagcccggtgtcaccaccgaggaactggaccgcatctgccacgaccacatcgtgaacgtgcagggcgccattccggccaacgtcggctaccgcggcttcccgaagaccgtgtgcacctcggtcaacaacgtcatctgccatggcatccccagcgaagggaaggtgctcaaggatggcgacatcatcaacatcgacgtcaccgtcatcaaggatggctggcacggcgacaccagccgcatgtacttcgtcggcacgccgtcggtgatggcccgccgcctggtggaaaccacctacgaagccatgtggcgcggcatccgcgcggtacgcccgggtgccacgctgggcgacatcggccatgccatccagagctatgccgaaggcgagcgtttcagcgtggtgcgcgagtactgcggccacggcatcggcaaggtctaccacgatgagccgcaggtggtgcattacggccgcccgggccagggcctggtgctgcagccgggcatgaccttcaccatcgagccgatgatcaacgagggcacccgctacaacaaggtgctgccggatggctggaccgtggtgaccaaggaccgcaagctgtcggcacagtgggagcacatgatcgcggtcaccgagaccggcgtggacgtgctgaccctgtcgccgggcgagtcgcaggtctcctga

SEQ ID NO: 536334 - DNA, 2628 bp, Stenotrophomonas maltophilia
atgctgccggcgagttcgctgctggacacgccggccgcgtcgctcaacgacccggactgggctgctgccgcgcgccaggcgctgcagcaggccgacgcgcgcctgtaccgccgcttcgaccagggcgacaacatcgagcgcctgctggcgctgcgcgcgcgcgccgccgaccatctgatccgcctggcgtggcagcgttgcctggccgccgatagcgggctgtcgttgttcgcggtgggtggctatggccgcggtgaactgttcccgcgatcggacatcgacctgctggtgttcggtgatccgccggcacagttggcgcatgaatccgcactggcacgcctgttcgcactgctgtgggactgcgggctcgcagtcagccatgcggtgcgttcggcgccgcagtgccgtgaggcggcggcggaccagaccgtgctgactgcactgatcgaggcgcgcccgatcctggccgatgatgcggcacgccgcgcgctgcgcgaggccatcgacgatcgggaactgtggccggcacgcgcgtttttcctggccaagctggaagagctgcgcaaccgccaccagcgttttggcgacaccgccgacaacctggagccggacctgaaggatggccccggtggcctgcgcgatctcaacacgctgggctggatggcactgcgtgccttcggcgtgcgtgacctggaggcgctggtcgggctcggccatctgggcgccgacgaagcggcagcactgaagcgcgaacgtgcggtgctggcgcggctgcgtttcggcctgcacctggtggcgcgacgccccgaagagcggttgcgcttcgattaccagaagaccctggctgcacgcctgggctttgaagacgatgccgagaatctcggtgtcgagaagatgatgcagggcttctaccgcgccgcgctggtggtgcgccggatcagcgaccgcctgctgcagcgcttcgaggagcagttcgacggcgaggcgcagccggagccattgaccgtgggcttttccctgcgccgtggctacctggcggccaacgaagccgactggccgcgcggcgatatcggccaggtgttcgcactgtttgccagctgggccaacaatccgcaggtgcgcggcctgcattcgctgaccgcgcgggcgctggctgaagcgctgccgctgttgccggcctacgaccaggccgacgccgatgcgcgcgagcagttcctggcgttgctgcgcggccagcgcccggtcgatacgctctcgcgcatggcacggctgggcgtgcttggccagtggattcccgccttcgcccaggtcagtgggcgcatgcagttcgacctgttccatgtctacaccgtcgaccagcacacgctgatggtcctgcgcaacatcggcctgttcgccagcagccgtgccgacgagcgcttctcgatcgcgcatgaagtgtggccacgcctgcgcaagccggagctgctgctgctggccggcctgttccatgacatcgccaagggccgtggcggcgaccattcggagctgggcgcggtcgatgcgcgcgcgttctgccaggcgcatgcgctgagcacgtccgacaccgaactggtggcgtggctggtcgaacagcacctgcgcatgtcggtgaccgcgcagaagcaggacatcgccgacccggaggtgatccatcgcttcgccaccctggtcggcagccgcgaccgcctggactacctgtacctgctgacctgcgccgatatcgccggcaccagcccgaagctgtggaatgcctggaaggaccgcctgctggccgacctgtacttcgccacccggcgcgcgctgcgcgaggggctggaacacccggtgccggcagccgagcgcgtggccgaggcgcgtgacagcgtgcgcgcgctggtgcgcgagcggggttacgacgatgccaccatcgaccgccagttcgcggtgatgccggatgagggcttcatccgcctgcgcccggagcagctggcctggcaggccgccgcgctggtgccggtgaagcagggccaggcgctggtgaaggtacgccggatcagcgtcgacgaccccgcgctggaagtattcgtgcattcgccggaccgcgacggcctgtttgccgccatcgtgatgacgctggaccgcaagggctacggcatccaccgcgcacgcgtgctggacggcccggccgataccatcttcgataccttcgaagtgaacccggccgataccttcgccgatggcagcagtgccaatctggaagcggcgctgcgcgacgcactcagtggtgacctgtcgcgcctgcggccgtcacgccgggtggtgccacggcagctgcggcacttccgctttgccccgcgcatcgaattccgcgatgagccgggtgcaacccgtttcgccctggtcgctcccgaccgccccggcctgctggccgatgtggcgttcgtgctgcgcaaccagggcctgcgcgtgcatgatgcgcgcattgccacgttcggcgaacgcgccgaagacaccttcgtgatcagtgacgaacacgacctccccctgactgaacctgcccggcagcagttgcatgacgcgatgctggcctgcctggaccctgatcgaaacgccggagaccccgcctga

SEQ ID NO: 536335 - DNA, 1065 bp, Stenotrophomonas maltophilia
atggccaccaagcccgccaagaagaccgccgcgacccccaagagcgcagcggcccggaaacctgctgccgccgcaccggccgcgaagaagaccactgcgccgaagaaggccgctgcggtgaaggccccggcgaagaaagcggctgcagcgaagaaggcaccggccaggagcgccgaagccgtccgcgccgaaaccatcgcccgcaagtcgctgcgcaagccgtcggcaccgggtgtggaagagctgaagtttggtatcgagagtgccttcgagcgccgtgccaccttgaccctgcacgagctggaaggctcgaccaagccgctggtcaaccgcgtgatcgacggcctggagagcggtgagttccgcgtcgccgagccggatggccagggtggctggaaggtcaacgagtggctgaagaaggccgtgctgctgtatttccgcgtcaacgacatggcggtggtcgatgcgcgcccggcgccgttctgggacaaggtcgaatcgcgcttcgccggttatgacgaagcgaagttccgccgcggcggcgtgcgcgtggtgccgggcgcgatcgcccgccgcggtacctacttcggcaaggacgtggtgctgatgccgagcttcaccaacatcggcgcctacgtcggcgaaggcaccatggtcgacacctgggccaccgtcggttcgtgcgcgcagatcggccagcactgccacctgtccggtggtgccggcatcggcggcgtgctggagccgctgcaggccagcccgaccatcatcgaggaccactgcttcatcggtgcccgttcggaggtggtggaaggcgtggtggtcggtcaccacagcgtgatcggcatgggcgtgttcctcagccagagcacccgcatctacaaccgtgccaccggcgaaatcacctacggctacatcccgccgtacagcgtggtggtgtccggctcgctgccgagcaaggacggtacccattcgctgtactgcgcggtgatcgtcaagcaggttgatgccaagacccgcagcaagaccagcgtcaacgacctgctgcgcggcctggccgactga

SEQ ID NO: 536336 - DNA, 867 bp, Stenotrophomonas maltophilia
gtggctgcgccggaggatctggcgcagtccgcgatctaccggcatccgtccgacaccctgttcgggcggatgctgccgcgcctgctgcacgccccgcgctggacccggctgcgccgcgcactgtcgcggcgctggccgatgccggcgatggtcagcgatgtgcgcgatgtggtctacgtgagctggtgggtcgatgtgcgccacgcaccatcgccaccgccgggccatcattacgtggtccatgccggacgtacgccttacaccatcctcagctaccgtcacggccacttcgggccggcgttggccggaccgctgcgttccctgatgccgtctccaaggcagagcaactggcgctggtacctgcgtcgtgacgacgctccggacgggacaccggtggtgctgttcgaccgcaacgtgatggaccagctgcccttcgtcgccggcgcgcgtgccttcagcgatgccatgcagccgcatctttccacccgcttcgaacatgcggtgcgcactgatggccgtgggaatacccggatcgaaggcgggcagggcagtgcgccggagctgtacctgcagtggcaggctgctgcgggctgggaggacgcggcatggacggcggctttcggtggccatcaggccctcctgcgtttcctcacctgccaggacgaggccatcgcccgtacctgcgactgtcgctgggccagcacccgtatcgcgctgccggtcgagatcgaccgcctgcagccgctgcagcttgaaggcgagctgcagtgcccgcgcctgcaggcgctgggtgtgaacctgaccgaggggctggccttcctgctgccacgggtgccgttccgggtcgtgtccgagcgcctgttgtga

SEQ ID NO: 536337 - DNA, 366 bp, Stenotrophomonas maltophilia
atgagcaccactgtctacggtttgaagaactgcgatacctgcaagaaggcgaccaagtggctggaccgcttcggcgtgccgtacaccttcgtcgactaccgcgacaacaaacccagtccggaaaccctgctggcgtgggcagcgcagctgggtggcctggcggcgatggtgaacaagtcgtccaccacctggcggcagttgccggacaaccgcaaggccgccgattccgaggccgaatggaagctgctgctgcgcgagtacccgcagctgatcaagcgcccgctggtggtcaccgccgacggcacggtcagccagggtttcagtgacaacggcttcaaggctcgcttcggcgtgggtgacgcatga

SEQ ID NO: 536338 - DNA, 1128 bp, Stenotrophomonas maltophilia
atgagcgcggtcctcgacctgacctgcgaactgatcgcacgaccctcggtgacgccggaggatgctggctgccaggcactgctggcggcacgcctgaagcaggccgggttccagtgcgatcacctgcgcctgggcgaggtcgacaacctgtgggcgacccacggccagggcgcgccggtactggtactgctgggccataccgacgtggtgccgacgggtccgcgcgaggcctggaccagcgacccgttcacgccgcagatccgcgatggcgtgctgtatggccgtggcgccgccgacatgaagggcagcgtggccgcgttcgtggtcgccgccgagcagttcgtcgccgcgcatcccgatcaccccggtacgctggcggtgctgctgaccagcgacgaggagggcgacgccatcgatggcgtgcgccacgtcgcacggttgttcgccgaacgcggccagcgcatcgactggtgcatcaccggtgagccgtcatcaaccgcgatcctgggcgacctgctgcgcgtggggcgtcgtggcagcctgtcggccaagctgcgcgtgcagggcgtgcagggccacgtggcgtatccggaaaaggcacgcaacccgattcaccaggcggctccggccctggccgaactgagtgcacggcgctgggacgaaggctacgagagctttccgccgaccagcctgcagatctccaacatccatgccggcaccggtgccaacaacgtgattcccggcgagctcgaagtggatttcaacatccgctacaacccgcactgggatgcgccgaagctggaggcggagatcaccgcactgctggaccggcatggcctgcagtacaggctgaagtggcaccgcagcggtgagccgttctacaccccggaaggcacgctgcgcgccaccgcccgtgcagtgctggccgagcacatcggccgtgccccggaagaaagcaccggcggcggcacgtccgatgcccgcttcatcgcgccgttgggtgcgcagtgcatcgaagtggggccggtgaacgccagcatccatcaggtggacgagaacgtgcgcgtggacgaactggaagcactgcccgggctgtaccagcggctggtggaacggctgctggtgtga

SEQ ID NO: 536339 - DNA, 1692 bp, Stenotrophomonas maltophilia
atgtgttcgatcttcggaatcttcggcctgcaggccggtgacgatcttccggccctgcgccgccatgcgctggaactgtcgcagcgccagcgccaccgtggcccggactggagcggcgtgtacctcgacgaaggcgcgctgctggtccacgagcggttggccatcgtcgacccggccggtggttcgcagccgctgctgtcggccgatggccagctggcgctggcggtcaacggcgaaatctacaaccaccagcaactgaaggccgcactgactaccgcctacgacttccagaccggttcggactgtgaagtgatcaacgcgctgtaccgccagggcggatcgccggcgcagtggctggagcagctcaacggcatcttcgccttcgccctgtgggatcgtgctgccggacgcgtgctggtggcgcgggatccggttggcgtggtgccgttgtactggggccacgatgcccaggggcgcctgcacgtggcctcggaaatgaaggcgctggtcgatacctgtgccgacgtcgcgcagttcccgccgggccactatttcgacagtgcccgtggtgagctggtgcgctactaccagcagccgtggcgcgactatgccgacgtgcagggccgccaggccgatctggccgaactgcgccaggcgttcgagcatgcggtggaacgccagctgatgagcgatgtgccgtacggcgtgttgctgtccggtggcctggattcgtcgctggtggcggcagttgccgcacgctacgcgcgtcgccgcatcgaggatggtgggcagaccgaagcctggtggccgcggctgcattcgttcgcgatcggtttgaagggctcgcctgatctggccgccgccgcgatcgccgccgaggcactcggcaccgtgcaccacggcttcgagtacacgttcgaggaaggcctcgatgcgctgccggaagtgatccgccacatcgaaacctacgacgtcaccaccatccgtgcatcgacgccgatgttcctgctggcacgacggatcaaggcgatgggggtgaagatggtgctgtccggcgagggcagtgacgagatcttcggtggctacctgtacttccacaaggcaccggatgcgcgcgaattccacgacgagctggtgcgcaagctcgatgccctgcacaactacgattgcctgcgtgccaacaagtcgatgatggcctggggcgtggagccgcgcgtgccgttcctggatcgtgagttcctcgacgtggcgatgcgcttcgatgccgcgcacaagatggtcggtgccgggttcggtggccgtcgcatcgagaaggcggtgctgcgcgaggcgttcgatggctacctgccggacagcatcctgtggcgccagaaggagcagttcagcgatggcgtcggctacggctggatcgacgggctgaaggcgcatgccgaagcgcaggtgagcgaccgtgtgctggcggccgccgacaagcgcttcccgcacaacccgccgcagaccaaggaggcgtactactaccgccacctgttcgagcagttcttcccgagccgcgcggccgccgagaccgtgccgggcggcaagtcgattgcctgttcgtcgccggcggccattgcctgggacgccagctttgcggcggcggccgacccttccggccgcgcgatcgccggcgtgcacgagcaggcgctggcctaa

SEQ ID NO: 536340 - DNA, 489 bp, Stenotrophomonas maltophilia
atgaaaggcaacccggacgtcatcgcctgcctgaaggaactgctgcgcggcgagcttgcagcccgcgaccagtacttcatccattcccgccgctacgaggaccagggcctgttcgcgctgtacgaacgcctgaaccacgagatggaagaggaaacccagcacgccgatgcgctgctgcgccggatcctgttcctcggcggcgacccggacatgcgcccgcatgccaccgagccgggcaagaccgtggaagagatgctgcagaaggatctcgacactgaatacgcggttcggaacaatctcgccgccggcatgaagctgtgcgaagagaacggcgactacgtgagccgcgacatcctgctggcgcagctgaaggacactgaggaagaccacgcctggtggctggagcagcagttgggcctgatcaagcgcatcggcctggagctgtaccagctgagcaagatcgacggcaacggcgccccggcgcactga

SEQ ID NO: 536341 - DNA, 2244 bp, Stenotrophomonas maltophilia
atgaccgaacttgcccgccccgtgttccacggattcgaacaactgccgctgcgcgagtacgccgaacgcgcctacctcgactattcgatgtacgtggtcctggaccgcgccctcccgttcatcggcgacggcctgaagccggtgcagcgccgcatcatctattcgatgagcgagctgggcctgaacgccgcgtctaagccgaagaagtctgcgcgcaccgtcggtgacgtcatcggtaagtaccacccgcacggcgacagcgcgtgctacgaggcgctggtgctgatggcccagccgttctcgtaccgctacccactgatcgagggccagggcaacttcggctccagcgacgacccgaagtcgttcgcggcgatgcgttacaccgaatccaagctgaccccgatcgccgaagtgctgctgggcgaactgggccagggcaccaccgactgggcaccgaacttcgacggcaccctgcaggaaccaacctggatgccggcgcggctgccgcacctgctgctgaacggcaccaccggcatcgccgtgggcatggccaccgacgtgccgccgcacaatctcaacgagatcgtcagcgcgctgctgcacctgctggacaaccccgatgccagcgtgcgcgacctgtgcgagcacgtgcagggcccggactatccgtccagcgccgagatcatcaccgcggccaatgacctgcgcaacatctacgagaccggcaacggcagcgtgcgcgcacgtgcgaccttcaccaaggaagcgcacaacatcgtggtcaccgcgctgccgttccaggtgtcgccgtcgaaggtgatcgagcagatcgccgcacagatgcgcgccaagaagctgccgtggctggaagacatccgcgatgagtccgaccatgccaaccccgtgcgcgtggtgctggtgccgcgttccaaccgcgtcgacgccgagcagctgatgggccacctgttcgccaccacggacctggagcgcagctaccgcgtcaacctcaatgtgatcgggctggacggccgtccgcaggtgaagaacctgaagatgctgctcagcgaatggctgaccttccgcagcaacaccgtcacccgccgcctgcagcaccgcctgcagaaggtcgagcgccgcctgcacctgttggaaggcctgctggtcgccttcctcaacctggacgaggtgatccacatcatccgtaccgaagacgagccgaaggccgcgctgatcgcgcgcttcggcctgtccgaggaacaggccgagtacatcctggaaaccaagctgaagcagctggcccgcctggaggaaatgaaaatccgcggcgagcaggatgaactggccaaggagcgcgagaagatcctcggcatcctcgacagcaaggccaagctgaagaagctgatccgcgatgaactgaccgccgatgccaagaagttcggcgacgcacgccgttcgccgctggtgcagcgccaggccgcacaggccatcgacgagaccgagctggtgccgagcgagccgatgaccgtggtgctgtcggagaagggctggatccgtgccgccaagggccacgacgtcgatgcgtccgccctctcctaccgcgacggcgacgggctgcagggcgcggtgcgtgcgcgcagcacgcagcaggtcgcgttcctcgacagcgaaggccgcgcctactcgacgccggtgcacaccctgccctccgcacgtggcaatggcgaaccgctgactggccgcttctcgccggcagcgggtaccagcttcgtgaccctggccagtgccgagccggacacccgcttcgtgctggcctccagtcatggctatggcttcgtcacccgcttcgagaacctgatcggtcgcaacaaggccggcaaggcgatgctgaacctgtccgcaggttcgtcggtgctgaccccgtcggcagtggccaacgtcgccaccgaccgcatcgtggcagtgaccagctccggcaacctgctggcgatcgccgccaacgacctgccggaactggacaagggcaagggcaacaagatcatcgagatcccgaaggccaagctcgccaccgaacgcgtggtcgccatcgtggcgatcagcccgggacagaccctgcaggtgcgcagcggccagcgcaccatgggcctgaagttcaacgagctggatgcctacctcggcgcccgcgccacccgcggccacctgctgccgcgcggctggcagaaggtggaagggttgtcggtggagtaa

SEQ ID NO: 536342 - DNA, 879 bp, Stenotrophomonas maltophilia
atgaacaaggcagaaattccccctcccaagcgcctgctcagggacgacgcactggactggttcgagcgcaatgacgggccaccggctgtcgccttccgcttcgacagcccgcagggattggtccgagaagtggattggcatcatcaccagcgcgcgcagctgatctgcgtggagcgcggcctgttgaccacccggacctcgcacgggacatggtcactggcgccgggctcggccggctggatgccgccgctggagccacatacggtcaccctcgacggcccgctgcgcggctggggcatggcactggccgcgccggcctgcgccaccctgcctgccgatccctgcgtgctgggcctgtccaagctggcgcaggcgctggccgaccgcatctgcgaatggccgctgggctatgacaccacacccgagcgccagcacatcatcgaggtactgctggacgagatccgcaccgcgccgcgccagcgcatgcatctaccgatgccgcacgaccggcgcctgctgaagatcgcctcgcagctgctggccgacccctccgacgagcgcagcctggccgaatgggcgcattgggccggcctgtcgccgcgcagcctgacccgtcacttccgcgacgagaccacgctcagcttcgcccagtggcggcagcaggcccgcttgtccgaggccctgcgccagctgaccgacggccgcagcgtggccgacatcgcccacgcgctgggcttcagcagcgccagcgccttcgtcaccgtgttccgccgccacttcgggctgccgccggggcgctacctggcacgggccggccacggcctggaaaccgggctggaccctgcacgcggcttggcatcccccgccgcatccggataa

SEQ ID NO: 536343 - DNA, 444 bp, Stenotrophomonas maltophilia
atgatctgtcctgcaagcactccccccagcttcggcctgctgctgcgccaggtgcgcgacggcctggtccgtcaactcgacgcatccatggctgaagaagacctgggtatcggtttcacccactacatcgggttgaaggtgctttccaacatggccccgtgcacggccaacgagctggcccaggccatcgaccaggtgcccagtgcggtgacccgcctgttggacaagctggaggcgctgggctgcgtccgccgcgagccgcatgcgcaggatcggcgggcgctgcagatcgtactgaccgatgaaggccgcgcgctgtgggcgcggctgaagctgcgtggcgacgcggtgatggattacgccctgcgtgatctttccgccgacgagcgcacgctgctgctgtccctccttacccgaatccgcgattccctgacgaccccatga

SEQ ID NO: 536344 - DNA, 1494 bp, Stenotrophomonas maltophilia
atgaacccgatcccgcattccactctccgccggtccgggcgcgcgctgctggtgtcagcgctggccctggccctggccgcctgcgccagcagtcgtggcctcaacccgcagggccacgtgcttgacgtggacagcctgcacagcgaacgcaccttggccgacaccgacctgagcgccaccggcttcccggcgcaggactggtggaaggcgctgggcgatgcgcagctggacgcgctggttgccgagggcctggccggccacccgagcctggacgccgccgacgcgcgtctgcgccaggcccaggcccaggtcggcaccgcacgtgccgatgaactgccgagcctgtcggtgtccggtggctacaccggcctgcgcctgcccgagtcgatggcaggcagcgagatcggtggccattacgccggcagcagccaggtcgccttcgacttcagctacggcgtggacctgtggggcggcaagcgcgctgcctgggaagcggccgtggacggcgcccatgccgccaccgtcgaagcccaggccgcacgcctgaacctgtccaccggcatcacccaggcttatgccgacctcgcctatgcgtggcagctcaatgatgtggccgaagaagaactggcccgctcgcagaaatcgctggagctgacccgccagcgccgcagcgccggcatcgacagcgacctgcaggtgcgccaggccgaggcccgggtaccggccgcgcagcagcaggtgcaggccgcacagcagcgcatcgacgcggcccgcaccgcactggccgcgctggttggcaagggcccggaccgtggcctgtcgatccagcgcccgcagccgctgaacccggtggcgctgcagctgccgggcgtgctgcccagcgaactgctcggccgtcgccccgacatcgtcgccgcgcgctggcgcgtggaagcggccgacaagcagatcaaggtggcaaagaccaagttctacccgagcttcaacctgaccgcgctggccggcgtggtcgccccgaacgtgggtgacctgctgaagagcagttccaccttcgcctacatcggcccggcgctgagcctgccgatcttcgaaggcggcaagctgcgcgccaacctggccaacaccgatgcgcagtacgacctggcggtggccaactacaaccagaccgtgctcgatgcgctgcgcgacgtggccgaccaggtcaacgcggtgcgctcgctggcgcagcaggcgcattcgcagcagcaggccgtggacaccgcacgctcggccttcgacctggcccagcagcgctaccgcgccggcatcggcagctacctggacgtgctgaccgcgcagtccacgctgttgcagtcgcagcagcagctggccggcctgcagtcgcagcaggtgcagacctcggtgcgcctgagcaaggcgctgggcggtggtttccagcccgctgacgccgaccgcgcaccgatcgcctcccattccgattcctcgcattcctga

SEQ ID NO: 536345 - DNA, 1182 bp, Stenotrophomonas maltophilia
atgagccagacccaagacaccgcggccccggccgcctccaaccgccgcggcaacctgctgcgcggcctgttcgtgatcgtcgtgctgctgcttgccgcactggcgctgtggtacttcatgttcggccgttggttcgaagagaccgacgacgcctacgtgcagggcaaccaggtacagatcaccccgctggtggccggtaccgtggtcgccatcaacgccgatgacggcatgcgcgtggagcgcggccagctgctggtgcagctggacccgtccgacacgtcggtggcgctgcagcaggccgaagccaacctggccaagaccgtgcgccagacccgtggcctgtaccgcagcgtggaaggtgcgcaggcggacttgaacgcccgccaggtgaccctgaagcgcgtgcgcgaagatttcgctcgccgcaaggacctggccgccaccggcgccatttccaatgaagaactggcccacgcccgtgacgagctggccgctgccgaagccgccgtggccggttcgcgcgagaccgtcgagcgcaaccgcgcgctggtcgacgacaccgtgatcgccacccagccggacgtgcaggcggccgccgcgcagctgcgccaggccttcctcaacaacgcccgcgccggcatcgtcgcgccggtcaccggctacgttgcccgtcgttcggtgcaggtcggccagcgcgtgcagccgggcaacgcgctgatggcggtagtgccgaccgagcagatgtgggtcgaggccaacttcaaggaaacccagctgcgccacatgcgcctgggccaggaagtggagctgaagtcggacctgtacgccggtgacgtgaagtacaagggtcgcgtccagagcctgggcctgggcaccggctcggcgttctcgctgctgccggcgcagaacgccagcggcaactggatcaagatcgtgcagcgcgtgccggtccgcatcgccatcgatgccaagcagctggccgaacacccgctgcgcatcggcctgtcgatgaaggctgaagtgagcctgcgcgaccagaagggcgaagtgctgccgagcaccgcggccaagggcacggtgttcgacaccgacgtgtatgccaagcagctgcatgatgccgacgaggtgatccatacgatcatccagggcaacctgccgcagcagcaggcgaaggtgggctga

SEQ ID NO: 536346 - DNA, 1587 bp, Stenotrophomonas maltophilia
atgtccgcacaagctccagccgcgcccggcgctccgggtgcaccggcggcgccgggtgcggcctccgggttcctgccgcccagcgtcgccctgtgtaccgtcggcctggcgatggcctcgttcatgcaggtgctcgacaccaccatcgccaacgtctcgctgccgaccatcgccggcaatctcggtgccagttcgcagcaggcgacctgggtcatcacctcgtttgcggtcagcacggccattgcgctgccgctgaccggctggctcagccgccgtttcggcgaacgcaagctgttcgtctgggccacgctggcctttgtcatcacctcgctgctgtgcggcctggcgcagagcatgggcatgctggtggtgtcgcgtgcgctgcagggcttcgtggccggcccgatgtacccgatcacgcagtcgctgctggtctcgatctacccgcgtgagaaacgtgggcaggcattggcgctgctggcgatgatcacggtggttgcgccgatctgcggccccatcctcggtggctggatcaccgacaactacagctgggaatggatcttcctgatcaatgtgccgctgggcatctttgccgcgctggtggtgggcaaccagttgaaggggcgcccggagcacatcgagaagccgaagatggactatgtcggcctggtcaccctggtgatcggtgtcggtgcgctgcagctggtgctcgacctgggcaatgacgaggactggttctcgtcgatgaagatcgtggtgctggcgtgtgtggctgtggtcacgctgacggtgttcctgatctgggaactgaccgacaaggatccgatcgtcgacctgaagctgttccggcatcgcaacttccgcgccggtacgctggcgatggtggtggcgtacgcggcgttcttcagcgtggccctgctgattccgcagtggctgcagcgtgacatgggttacaccgcgatctgggcgggcctggcgacggcgccgatcggcatcctgccggtgatcatgaccccgttcgtgggcaagtacgcatcgcgcttcgacatgcgaatgctggccacggtcgcgttcatcgtgttgtcgatgaccagtttcctgcgttcgaacttcaacctgcaggtggactacacccacgtggccggcgtgcagttgatcatgggcatcggcgtcgcgctgttcttcatgccggtgctgcagatcctgctgtcggacctggatgggcgcgagatcgcggcgggctccggcctggccaccttcctgcgtacgctgggcggcagtttcgcggcgtcgctgacgacgtggctgtgggcgcggcgcacccaggtgcaccatgctgacctgaccgagcacatctcggtctatcagccgggcatgcaggaccaggtgacggcgatggggcagggcgatctgcaacatggtgccgcggtactgaacaacatgatcaaccaccaggcatcgcagatgggcttcaacgacatcttcttcctgctgggctggatcttcctggcgatcatcgcgttcctgtggctggccaaaccgccgttcggcgcaggcgcaggtgcggccgccggcggcgggcactga

SEQ ID NO: 536347 - DNA, 279 bp, Stenotrophomonas maltophilia
atgcagcgcaacatcatctgccctcactgccacaccggctcgaaccacggcgtacgcgtatgcgtgggatgccaggccgaggtccactacggcgcatcgaaggaggccgtaatgttcgtctttgtcgccgccatcatctgcggcgcactggtcggcagccgattgcaggccactgccggctggatcacgtgcggcgccgtacttgtggcgggaatgtgggccatttcccgattgttccgtgatcgggtggtgttcaagcgcatctatcgcacgcgctga

SEQ ID NO: 536348 - DNA, 900 bp, Stenotrophomonas maltophilia
atgcggatggatatcgccgacctgcgcctgttcctggcgattgccgaggcgggcagcatcacggccggcgcggcgcaggcgaacctggccctggcctcggccagcgaacgcctgcgcacgatcgaagccgatgccggcaccgtgctgctgaaccgccatccgcgtggcgtcagcctgactgaagccggcgccgccctcgcccaccatgcacgcctgatcctgcagcagcaggcgcagctgcgcggcgaactgcaggcattcgcgcatggcgcgcgcggtaccctgcatctgtatgccaataccgctgcgctgaccaactacctgccctcgcggctggcaccgtggctggccgaacgcccacgcctgcacgtggaactgctggagcgcaccagccccgaagtcgtgcgcgcgatcagcgctggccaggccgaggccggcatcatcagtgatgcggtcgacgctgccggcctgcagcagcatgtggtggccgaagatccactggtgatgctgctgcccgcagaccatcgcctcgcatcgcggcgcagcctggccttcgccgatgttgccggcgagaccttcgtcgccctggccgatggcaatgcactgcagacctacatcgaggaccaggcacgcgacatcgggcggcgcctggacgtgcgcatccgcatgaagaccttcgaaggggtgtgcatcatggtcggccacgacattggtatcggcatcgtgccgcggaccatcgcccgccagcatcggcgcagcacgcataccgtcgccgtaccgctcgccgatgcgtgggcacagcgccgcctgtgcgcctgttttgccgagtgggcgcagttgtcatcggcaatgcgcagcctgctgcttcacctgggcgtgcagccgcagaaaaagctgtga

SEQ ID NO: 536349 - DNA, 894 bp, Stenotrophomonas maltophilia
atgcgcaaactgctttttagcttactcatgctccttgcaccaacaactgcccttgctgctcaagaacctcattggtcaaaactcacttcatcgaatttcctgatgagcccgagcacagctcacgctcaattctttgatcaaagttcaaccggaatcatctatggctcttcaactcccgcctcctatggagaagtcgtgtcaaggagcatctcgttccaaaccgaaacactaacaccgaagaagaagccaagaggacggatctatcggtttttccatcctggccaggaacggatctggaaaggcgtccatccagatctcagagaaaagatggaggcaattcaggatgtcttggaagcggaagggtttgatataaggccagttgaaggatatcgaagcgctgaacgtcaaaccgccctcctcgcctccgcatccggggtcacgagtgttggagcctggtcgagttgtcacaactatggcttagcgctggatgctgctgtctacgtgggtggaaagccgagctgggatctgagcaatcctcatatcctggccggatatgagcgcttcggcgagctggctgagatcctcggattgaactggggtggccggtggacctctcccaaagactatccgcatgttgagatgaaagccgagtgtggtcagtccaaatgggcaaagcgccacggccaacctctacccaagttcaccgcgaacgctggcgaaccatcttctttcgttcttgaacgagcgcttatttcgacttggtgcccaactggattggaagccacatgcaccgctatgggcaaagatcggttcctttcctggggatggactgttcagcgcccaaatagagcatgcatcgcccggcccgacctcttcaaatacgctttttcctaa

SEQ ID NO: 536350 - DNA, 627 bp, Stenotrophomonas maltophilia
atgaaacatctactgttaagcgcagcactagcgctttgtccatttgcatcaaatgcaatgcaagtctcgcccctggctcaaaccatcaatccacaaaagaacaatggttcattgactgtcgtcaacacgtcgaatgaaaagaaggaataccagctccaagcgtttaaatggaccatggttgatggaaagcagacccgcacaccaattgatgagatccgtttcgcaccaagctcgttctaccttggcgggggcaaatctcaagtagtccgcttcatcaacgccgagacatccagcaatgagcttgcttatcgcgtcgtcgtgaaagagaagaacgtcaagaagctggagatgactggggttgagcccgtcttcaacatggacttccctattttttggcgagcatctgatcgagccacagtgaccgcaaagacttctggatcaaccattgttcttcgcaacgcaagcccgataaccgcccagatcgcgaacctcaactatggcagctatcgtcgtgatggcttggtcggctacttgctcccaggcgaagaaatgatcatctccaaaggcagcgcgacatcagtcagcgcgctgataaatggcgtcgctactgagctagtgattgagtaa

SEQ ID NO: 536351 - DNA, 429 bp, Stenotrophomonas maltophilia
atgaagctgtatctattatttttgccactggcactagccatctttttcaacgctgaacccgcaaaagacagcaatcagctcaagttccaaagcggcccgtctcccaagtttcttgaacagatgaaacgcgatctgccgagactcagattgcaaacgaagcaagcttttgaggaaagcttgattgtcagcgattacgcagaaaagcatccttataactcaacgtgtgccagtgcgtctctcgatagcaaacgcctggcgagagaggcagctgcggactactttctggctagtgcctattttgagggagcggctgataggctagccaagctgagacacggctttgccaactcacagcgatctattgaagcctcacggacgtgcattgaagccaacagctcagacaactattacaccacaggcaagaagtaa

SEQ ID NO: 536352 - DNA, 420 bp, Stenotrophomonas maltophilia
atggccttcggtcccacatccgctggcaccaggatccaacaggagacggcgagtcttacccaactggctgacaccatcgctgcggacttcgccgtcgcagaagggcgctatcaaagcgtcagcacagcaagcgccgttgagcgtaagttggccccgactgcctgggtagtcagccaggaactgcactcccggaccctaggaaacatcgagctctcacccctcaatgcagggcagggcttccgaatcaccgcgactgcagtccaggcgaacctgtgcctagggcttgtgcagagctccgccagggcgttttcggaagtccacgtcaatggcgtgctggtctactctcgccgttctctcaatcacggtgcgttggccgagagctgtgctgagggcggcgcagtcgcgtttgaccgaatctag

SEQ ID NO: 536353 - DNA, 198 bp, Stenotrophomonas maltophilia
atgaaaaacattccacatccattcttgcttacagctttgcttttgagcttcgtcaccatgcttgtgctttggccgaccaatggagccacaggtgctcagctgtctgcatatatggcatcagctgcccttgcactggctctgtgcttgacgcgctttaagaagatattggtggcagagcgagtaaaggccaagcgatga

SEQ ID NO: 536354 - DNA, 507 bp, Stenotrophomonas maltophilia
atgacaagctttgcagaagcacagaagagacgcaacgaattctaccagaacaatcctggcccgcaggcgacaatgtctgatcaggtcaagtcatttaaaaaagaagaggaaaatattacctcctacgcgaacgatgctctgagagatgaacttacttcactgtcaaaaagcgccgatccggagttgctgaaatcgaaggttagtcaagttgatttccaaagtaagctttcggtctatcgctctgacgaaattgaaaagatcatgcatgcgcagacacagaacgcggaacgcatgtcacgcagtcagaccaacgatggctatcagaagcagttcatcaaccgagatggcattgaagaagagaagcaacacgaagagaagtttaatgccttcatgcgtgaaaagggtcgtgttcctgttgagggggagatggaaaaattcattgccaagccaacgatcactcagtctgaaaagccctgggagaaaaagcccaaagcacagtccatgtaa

SEQ ID NO: 536355 - DNA, 819 bp, Stenotrophomonas maltophilia
atgagtattggtgattacgaacgaagaaaacttttggaaaaagctgcaaagcttaaagctgaaaaagaggatggaccatcttttccaagtcctctaaacaagcagcaagttcaagatcgggagatggatcagcgcttggagcagacccaggttgcagccaaggcaattgcacaagccacgagcaaacttgccaaagaggttgcggccaagactgccaagcttgcccagcaacaagcgcagcgggccaaagcaaaggcaggtgcatggaagcaagcacaggatgcgaagcgagcagaacaggaagaggtcaagcaaatcgagagtgctaagcctgatcaggaggaaactaacccggccatcgagaacacacctgttgtccacaccaaagcgctatcgaagcccactttcaagatcctggcttccatagcagccttcaccgctctttcaggagcaggtgcatggttctggactcagcacgagagcgagaagacccctgagctgcaccaggtcgatgtgccttccacgctgcctgttgcgccagctcctcaggtccaggaagcgcccaaagcttctgagcctgtccaagccgctgagcctgtccaagaagtgcctgtgacgcccattgtcgaggaacagtcaaagtcggttgaatcgacgctcaagaaggtggaccggtcacctgcggccaatgcggttgttcgcgcacccaaaaaacgatcagagatgcgacaacagattgaacaacccaaggcaaaggagagtgattgggtagacaaagctaacaatgatctcgatcacttcgcagaacaattaaaataa

SEQ ID NO: 536356 - DNA, 1071 bp, Stenotrophomonas maltophilia
atggagacgacagaaaaaattaggatcgagaaagtgaacgaagcgaagcaaagttctcttgatgatccgattgcgattttcagccaagccatctctgaactatcagctcgacagtcattctatctgccaacaaaacttcgtgagcagctgagatcaatgcagacctcttgcccgatctgcgcgtgtgacttctcccagcaatcatcaatcgtcgttgctcagatcgttcctgttgagctggggggaccggatgacttctcgaactgcttcctttgctgtgagcgctgcaatcgaagacgcagcacttcagatttgctcagccttggcgaaccgttctgcagcacaaccactgccccaccccttccatcacacggccgcgccctgggcttttcctcaacagacctgatgcagcgccgcgtcgagctcctggcccgctctgccaatcactggacacctcatacccgcaattcgatgaagagcacggtgttgaagcacctggccaagcgttgggctgagccgcgctttcgtgtcttcgcccaccactcgtctgacttagccctcattggctttacgcggcgctccggtgatggcgggagccttggtatcgccaaggtgctgagcaagttccaaggtgctggacagctgccaactgacgacgcgatgagcgtctacgaagtagagccagagcaattcctgagcctaatttggtctctcatcgatctcaacgcactcatcgtgtctgtgcgactcccaggcgaagacgcactggctcccggtagcgagtggcaagatttctggcctgaccatgtgcggtctgtcgctgctctcagatcgcgcctacggcctgatcatgccaccagagcacagcaaattcgccgctgccctgatgcattgcgtgtcctgtctgataggccagacgcggtcaggaagcgtcagaacaatgccgcaaaagttgaggctaaccgcagccagcgggccgccctctatcaccaaaagcgcattgagggcgctaccaaagaaggagcgtatgccgtcctagaggctcgacttgccattcttgcttctccataa

SEQ ID NO: 536357 - DNA, 813 bp, Stenotrophomonas maltophilia
atgaacagtgaagaatgggaacagcgctgcacggacgttaaaaacgaaatgatggcgcacgtatcaagcttcgttacgccaattagcatgtctgaagaacagggtttcggtgtcgcttggggaagcggaggctatcttggtgatggggagaatagctggctcattactgcaagccatgtattctctgatgctccaaaaggcgcagtgctcgctcacctgccacgtccaggtgaagattacgtagcgatagatgcccaccctgacttagcgagatggcctgtcgacgtggcagcagtgcgagttgctaggctgccactgaattcagaaaagaaattcattcccaagaatcggttggcccaacgatactcagcagtggaatcagagttgctattttggatcggcttccccggatttaatctcgcacgacacgatccgttggtggccgataaacgacgggccagcatgttcggcgaactacagttgccggctcttggaatgctttcacaatcagtccagggcgatggattgactcatcaagcatttgatcagaacaagcacattgagatcatgtatccgaacgctgcgaagaaagctgctggcgaacccgaggtctcactacccaacgctaagggaatgagtggaagcattctttggaacacaagatacgttgagatgcaaagggcaaaaagaaattggtcgccacttgatagtgtcgtatgcggggtggtctggggcgcactcgaagaccctgaggttattcttgccacaagaattgaatatattcgtgagtcaatcaagccgcctttcagctga

SEQ ID NO: 536358 - DNA, 963 bp, Stenotrophomonas maltophilia
atgctcttcgtttccgcactatgcaggtattggaaacttttggcgaaattgagaagaaaaatgaagatagaaggcagccacacgcacgtaagctcaatggtcaaacaaaaatcggtgctggcttattttaaagaaaagggccataggactatcggatcacgcatcgagtattacgaaaaattggtagatcgcttccttttaaggccagaacttacggatagtgaggcgtggtcgctagctgagctacaagagctttacgtagttatccatggagctcgaaaagataaacgcatcgatgatcaaacattaaagtgcctcaaaggaccgcacactttagacgatgaaaagtctaagaatgcagggaatgcgccacgtaatatcacattcgagctttacattgcttcaaagatggttatgtttggagcggacgtctccatccccccattcggaactggggcagacatactattcacatgtgacggaaagaaagttccaattgagtgcaaacgactctatgcgcaaggcagagttggacagctaatgcaagacgcatgctcgcaagtttcgggcagagtcgatgacggtagttttggtattgcagccatatctttaacgagagaattctgggcaagcaactcctcgtccgtcatagaatcagttgacgaggcaagaattgcagctgagcaactttacctcacgtggagagccaaagctgcggagatgctcgcgacttacccaaaggtagccttgatttacatccacatttatcttccatgcgtgggcgaagataaccgctttactgtctacgaaagagagttctatcggactcgcaaaaattatgaaggcctttcagaagcagcaattgttgatgatttcgaaagcgtgatgcggagcataggaattgcagatgccatcggcagtcgtttcgcggatgcaagcgccactgtcatcggcgcttcctag

SEQ ID NO: 536359 - DNA, 282 bp, Stenotrophomonas maltophilia
atgtttgcacagatccagccgatggacttcgcaaggctcgaaggtgacaggaaggacaatccgaagttcgtcatcgacgatgagttggttaaacttggcggcggtggcctagacggcgaagcgtatcgaattcggatcctgacacattgcgggcatcgggcgggaagcatggacgtgagcacaggaagcgccgttaacgcctacaatcaaatcgtcaacgccttaaatcagatccaggagcccaagagaagggcgaagcttgagaaaattctcaacatctaa

SEQ ID NO: 536360 - DNA, 366 bp, Stenotrophomonas maltophilia
atgaacgcttatatttcagatgtccaagtttgccttgccgctaaagagagctttggtctttgctccccagctgacttcctccacgaattaacaggctacgctcagtctgacttcgaccatgcttttgacagagcagcacgaaagggcctggtcaacgtctacgcacgagacacagtgctgatctcaggcaagggctcactgtttttgcagagtcaggccatcgaggatcataaatggcgtgcagttgaacgagtcaagcagaggctcgctagcagagaagatcgccggcgctgggaagtccagcagctcatcaaatcaaagatgggcttcgcacgagagattcgtgcgacgcacttagctctctga

SEQ ID NO: 536361 - DNA, 798 bp, Stenotrophomonas maltophilia
atgactaatgaagaaaaaataattctagctgcaacttttggggaaattgaagtcgttaaaggcttagttacagtctcagatcccagggctaattactcacaagctctgcaaatcgccgcatatagtgggcacaaggaaattgttaaaatgctcattccggtttcagctccaaaagcaaatgactcggcggcattgactttggctgcggagaggcggcataaagaaattgttgaaatgcttctgcctttctcagatccaaaagcaaatgactcggaagcgctgagatatgccgcacggggaggctatgaggaaattgtggaaatgcttctgcctgtctcagatccaaaagcaaatgactcggaagcactgagatatgccgcacgggggggctatgaggaaattgtggaaatgcttctgcctttctcagatccaaaagcaaatgactcggaagcactgagatatgccgcatataacggatataaagaaatggttaaaatgcttctgccggtctcagatccgaacgcagaaggctcaggggcattgcaaagtgccgctcgcaaggggcatcatggaattgttgaattgttaattcccgtgtctgatgtggaagcagcttgcgaacagcttgatgaatcagaaatatcactggtaaaggctatggaggcggatttcaggatgaaagagcttcaagcatccactgtccaaatcccacagagctttaaaggatgcgttgatcaagctcggtctgacagccagggcacggcggcaatccaaagagcccaggccaggaggctctga

SEQ ID NO: 536362 - DNA, 831 bp, Stenotrophomonas maltophilia
atggatgacatggaacgcttccgtatccgcaacctggtgctgagcgatgtggactctcagctgcaaggagaagacggcttccacgtttccagatacaagatgttcctgggcatcaagcatcacatgccgaagtttacgcatgcacgctatcaccggccctttgaaaaaactaaaagcatcccagggacagccatggtgctcgacaatgccctgtcgagagcgatgagagagattgcaaatcagatcaacggctttggtcagatgatacgcaagcttgaagcatgggatctggtgatcgaaggattagatcacgagcaagtattttcgcttgcgattgagcacattgaaccgcttgccaatctcgccatttcggcgacacaagcaatccgagggcaaatgatctacgccacggtcgagtgtggcgcactgaccaatagcatcatcgggcagccgcttcgctgggacggccgcacccaggtgaccatgaaggttgcaaagtccgtggctgagaagtggaaaggttggccggtattggcagagaggttgacccttcttgaagcccaggagctcaacgaggcaagcgggaacttccggaacagctttcagcacggcgcgcctcgccagctcgtcattgggctgacagagcacactgagtggaccaagcacgctgatggttccatttcttggggaattggaactcaggagcctatcaagctcaatgagatcatcccctacttgaagagtgcccacgaagaccttctcaaggcgcacgacgcgctagtagagctttctaaggaatgggagtcttctgtaatgactcccgccccttag

SEQ ID NO: 536363 - DNA, 189 bp, Stenotrophomonas maltophilia
atgcaaatcaaattatcgttgggaacagagtatcgagtaacattgctagacaagaacgttgttgtattgattgttcatggcacgaagccaggtgtagttcagtttacgctggatggcatctacggagagcgttcggacatagagttcctgcaatggagcaaaattgaggaggggattggaatagactaa

SEQ ID NO: 536364 - DNA, 5628 bp, Stenotrophomonas maltophilia
atgaaccggaaagtattgctcgttgaaatcggtggccagggcctgcctgcagtcacgcctgtgacccggcagccctccaactgggtggcgtcggccaagcccgctgttgtggttcctccagccgaaggcgtggagaccaagccggcagcagatagcgtgaccattacctggaacgcttcgccgctggctggcgctgtctatgtcctctggcgcgcagccgatgcgggcggtaagccgggtgaatggaagtacgtcaccaaaacctcagacacgcgctacacctacaccgaggccagtggcgttgtgagctggtggaaggtcactgtccaggttaacggcgtgtcgtctgcagactccacgcccaaggctcaggcccctgtagtcccgccgaccacggcggatctggtccagctgcagggcaaggtggaccagggcctgcgcgacctggcactggcagacgctgccgaggcacagcagcgaatggcggacttccaggctgcacaggcgcagatcctggtagagagtcagaagagtgcggccgccgtgggcgaagtggccaggcgtgccgaggatctggccaccaacctggccaatgaggagcgtgcccgaatccagagcgtgctcaacgaaaagaccgagcgcaccgcagacatcagtgccgtcaacacgaaagtccagaacggcctggattcgatggcgcgctctttggccgaggtcgccgcaggtagcggcacccagttcgactctgccggcatctggcacttcaacgccgggctggaaggctggacgggcgtgtatggaaccccgactatcgccgacggcatgctgcggccgatcaacaccgccaacaactccggcatccagtccccggcgccgctcaacatcgacggtgccgcctatcgcttcatcaagctgcgcatgcgcaaggtaggcaatcccgcctggatggggttgattcgctggatcaccgccgccgaccaggagtggaacgaagcgaagtcgctttccatccctgtgccggcattcgacaccaacggcatcgccgtcctggacgttgatcgtctgccctggaacggaccctcaccactgcgtgccattcgtctggcactgacgggtgcgcagaccaccagcgcctacatcgaatacgactggattgccgtgggccgcccatcgcctggcgcatccgtcgccatggtccagcaggagagcgaggcgcgtaccgccgccctggcggccgaggctggccagcgcaacacgctggccgtgcagatgcgcggcgactacatcggcaatgatccggcgaagctgacaggcggcctggcctataacgaaatgagggcgcgtgtcggcgcggacgaggccctcagccagcgccagtctgccgtggaggttcgcctgcctgcaggaacaggtgcactcgcgtctgaggccaaggtcaattccgtcgagcaggcaagcgtcacccgcgaccaagcaattggacaacgcattgaccaggtgaacgccacgctgccggtgattgctgcccagggcgccaacatggtgctcaacggtggatggcaatccggccgggacgtggcctggacctacaaccatgcgtcactcggcgtggcggccaccgagggccgcgcaggtggtgcgtgcctacgggtagacggcggaaccactgttgtgcgtggcgcaaccgccaacggcggcgtgcctatccctgtcgcgcctggaaagaagtaccgctatggctgctggtacaagacaacggcggactataacgggagcgcgaataacggaaagctccgtctggccacgcaggacaatgcgctgattggtggcgccacctacttctctgcgaaccagggagcgtggacctacctgggcgcggtttatgccatcccagaaaacacgtccatcaccggtctaaaactcaatatcaacgtggatcacacagcgggtacgttgtgggtggatgacgttgctattgaggaggtcaccgagatcctcgctgttgccgatggcctcagctcgctgagcgggacagtcacccaacaggctggcctcatcaatgcacagtctggcctcatcagcgccctgcgcactgacgtggatggcaaggcaaccaacggcgccctccaggctctgcagtcccaggtaacgcttcaggggaacacgatcaccagccagggtggagcgctcaccagcgtccaggccgccatcaacaacctgggcggagacaatcgcctgcgcaacagcagctttgaggttctgttgcccaacggcgttcctcagtattgggcgccctcatcgtcatccacggacgctgcgaacaagaccactcgcaagctggtggactctgtgctgccaggtagcaccaaggcctggcgctgggaaatggcgggcatccctgccaccgcctatgcagagtgctactcgtcggtgtaccgcatcgatccccagcagccggtcaccgtgtcctgcaacgtgcggggtaaaccgggcgcacgcttcttcttccagctcgggctgaaggatgcggccggtgcatctgtcggttggcctggcgggccagctgctggcgcgggcatggtcgtcacggaagcatgggagcgtaagtcctacacgttcccggcgtcgcagatcctcgccagcgcgaccggtgccaccctctacctccgggtatacggcgatggttcggcggaccagtggattgaggtggataacgcgcagctgcagaccggtgccgtcgccacgggctacgcgccctccctggaggagacggccgcgcagtccaatgcaaacgccgaggcgaacagcgccctcaacacgcgcgtcaccaacgcggagggacagctgctgtcccagggcacggcactcactgctgttcgtgctggcattggcaacgctacggtctacgaaatcaccgccaacgcgatcatcaccagtcagcccaccggagggccgcgctcgtctggagcacgaaacgcggcgggtgcggctgtgggtggtgccgggcgcagcctcaatgtgcaggtagtcaacgccgacagcactcttggccagcggcagacctttgacacgtatggcaacggtcggtcagcctgcgccagcttcaacgattggtacgacaacgctctggcagacaatcagtatttcatcctgttcaccagcgaccacaccggctcactaaatagcgacaccggcacggacacagtcgggaccagggaccgcctcgttgatgcgggcgccacccgtcgcaacgtggaagcattaaccggaacgcgcatgttcatcctggtcgggcgcaaacgcgctggagagggtgccggaatgcagcgactgtcgcctccggcctccactggacgcgccgaccaatgggttgagctcatcgtggaattcgtcaatgggcggccgcagggcagcctggacgtgtccgcgttggagcgggccacacaggcaaatgcggctgcgaattccagcttggaagcacgcaccttggccaacgaaagcagcgttacctcgttgggtcagtcgctcaccagcgtcaatgctcggatcgacggcatcggcggtgacaatctggcacccaacagcagctatgagacctcgccgagcgacacctcagaccccaccggatgggtgcgcgaaacgaacatggccaacgtcgtgctcaagtacattccatcgccgttgtctggtggaggtcgcgcgatccgtttggaagcgaacgcaactgcagtggggcagtatcttggcctcgctactcgcaatgacaacgggtggctccaggttcggccccgaaccccttacgtcttaagcagctacgtccgcgccactgctggaaccgggctgcgcatgtacgtccaatggcgtaacgctgccggtgtcatcaaggcaacgagcaccatgcccaacgtcgttgcgactgctcagtggcagcggctggtgtttcaggtggacaccatggttgacgatgtcgtggaggctcggctgttcgtaggtcgaatgcacgcgacggccgtccagggcgttgccattgagctagataacgcgctgttccaggaaggcaccgcagcaaccggctgggtgcccagcggcaaggaaacagcagcggcggcagcggcaaacgctgcggcaacggcgggccttacttcgacggtgacccagcaggggcagcagatcacggcattggggcaatccgttaccggtgtccaagcggagctggcgggaaaggccagctcgactgcgatgatcgagctcaacgctaaggtcagcagatcactcaccggtggcgggaatctccttgcgactaccgttttcggaagcggcgtagtgccgtggttcacgcgcagtgcgaatggcacctggaccagggatgacgtttcgttccaggaccgcgcgcctcctggaatgcgcacaatgactcactttgccgacgccaatcagcctaacgaggcagccctctttacctgccaggctgtaccttgtgaacccggcaagagctacattgcttcctgctacttgctcccctatttcgcccggaccaatgtttacgtcttcttcgtgaacaaggaaggaaatgtggtcggcgaggaacgcgctgcagattggtatcgtgagtacaaatttgacggaacgctggcgagctacaaacggcttcatgtgaagtctgttccagcgccgagtagcgcggtcacctgctggattcagatcgctacggtgaaagagcgcggtccagggccaggtgctgatgcagcgacctggatattgcggccaatgctggaggaagctggcgccgatcagaccgccccgtctccatggtcagcgggaggggccgaggattccgctggaatcagcttgctcaccaacgtcaacggacatatcgccgggaccatcatcaagaacactggccagcgttctgacgtaaccatcctgtcgaacatcctgcgcatcattagccctggaacgcctgacggcatggagctgcaggacggctatctgcgcgtgtggcgcggcaacgtccagcgcatcatcggcaacggtttcgggcccgatggattgattgactactttggcccgaacgtcggcgcagccggcgccaccaagcagaacgcgacagtgtggatggatgtcaacgggggcgcttactggggcggagccattgctgcaggcatccgccgcaatgcagcccaatccacgacaacgcagaccctcggcgtttcgattgtggttggcccgttcagcaccagcggacgcaacaagaacgtggttgtcagctatcagcggacgcatacccgcaggcacgggaacatgaattcgacgggctttgtcgcggggggcgggcggaatgcctgcgcggtctacgtctatcgcaagctcggcaacaacgctgagcagttctggaccagctttgaagccagtggcggcgtgatgattatgaacgagcgcgacggccccgacattgctacttcccgctgggcaggctctgtaaccctcaatgacagcgaaggcacgcaagaccgcacctaccgcgcagagatcgtcggtttcagcgaacaggatgtgagccatcagtcgggaagtttcaccggacaggacatctcagccagcctctccctggtttcaatcgaagagtga

SEQ ID NO: 536365 - DNA, 2439 bp, Stenotrophomonas maltophilia
gtgaggggatatctcagagtgttcgttgcgatgctcttggtagcatcagtggcaaatgtatgcgctaaggattcatctgtagattccggtgacggggtaacgcaagtccaaattgatgtactgaagcttcagtatgagcagaaaattattgagcgcgaattagctgagcaggctcgtagagtagaaagcgaagttaaggttttcgacaagagcgtctctgctctgtcgctaaggaatgatgctcaggataaacgtattgaagatcatgctggtttcttgtctggcttggtttccgtgattggactgttgctctcttttttagcgattgtactcacagttgcaggtgtcgcaggctacataactgtacgccgcaaggcttctgatgaggctaaggcagtcgctcaagaagaaacatcgaaatggtttgagaggcgctcttctaatctggaattggcagttgtagagctaaacaaaaagctcgaagctttagagtctgaggctgatgcaaggtataagcagcaccgcgatagaatgcgcgaaatggaggagggtgttgatcttgcaaggagaaacattcaggcccgccttgggaatgagcctgcagagccaatgagcatggaggcctcacttgctttggctgagtcagcaagggttgcaaaagcaaagccggaggcagaaagaagcttcgttgactggaataatactgcattcgaggcgtatcgaaattcagacaaaatctcggcggtcgagtcttggttggctgcttccaaggcagctggtgcaagtgcagaagagcggtcaggggcactttataacgctgcgctggctttaactgaactcaataagattgaggacgctattcatgtatacgatgagatatatcatgaatttgcgagcgagacctctgagcgcgcaaggttgaatttcgctcgcgcgatgcttaatcgtggtgttctcctctcaagagtcgccagatacgacgatgccaaggcgacttatcttgatctgatcactaggctggacagtgagatgaaggttgagtttgaagagcaattggcaaagtcgatgcttagcttgagtttcctgtatgcgaagactcgagatcgagttgcagagttttctgaatatgatcggttgattgcgaagtttggggggagatctgagtcgtctttgcagttggtggttgcgatggctttagttaattatggtgtcgcaatgcagcgtagcggcgatgcagagatggggagaggaaagtataatcaagtggtggagatgtacgggtctgtacaggatgaattggtgagggttcagcttgtcaaagccatgcttggcatggcgcattcattcgaaattgaggggcgtagacgcgaggaggttgaatggtatgacaatattgtatcggaattctcaaatgaagcctcagattccattctgcaaatggtcgttcacgcgcttgcaaagaaggctgtcgctctctatcagttgggtgatgctagcggcgcgctcgatgtttatgggttaatccgagaaaagtttagctcgggcatgagtcctggcgttggtaaggaagtaagtgttgcattgttcaatgagggtattttgttgcataagcttgagcggttcgaggcggaactgctctcttacgatgatgtcctgagtcgtatagatcgaggggttgggcaggagtataagagacttctggcaagtgttcttataaacaaggcaaacgtgctcggcgctcttggaaggaatgctgaaaagattgctgtatgtgatgagattttgtcgcggtacgagcaggatgatgagtcggatagccgcgatttcataatggacgctatgctgtaccgtgcggatgcgatgatcgaagccggaaaacaagaggacggattgcgcgagtatttcgcgattatcgataggtttggcgccggtgacgatgagtcggctcgacgtgccgttctcgccgccaagatttgtgtggcacgcgagtacgcgattcccggagagaatcaagctgggcgatcaatcgaaatattggatgaagtcctgagcgaggaagatagatatcgtgatttcgagaatctgctgctcgctgcgagaattggacgaggcttcgcgagtgttattttggctaaggaaaggtggtctgatatttcccaaagagagaatctccttcatggtgcgatgaaggactttgaagcggcggttgccctcggtccggaggattacattggttggcagaatagctcctactgtctgtatcttcttaatggagaggtgtcggaagttattgaaatgttgaggaaggcgctgaatttgggggctggtgaagcgttcgaggcggcaatctccgacacgaaaattcatccaattgcagtattggacgaaagttttgaatcaattgttgagcgagagtggtcgaagatcaggcaagcttga

SEQ ID NO: 536366 - DNA, 1809 bp, Stenotrophomonas maltophilia
atggcggatcgtaacgttcacgtcaaggaatacctgcgctactacctttcgctgtccacttcgccgggattcgccgttcttctggatggcccgtgggggatcggaaagaccttcgtcatcaagacattcctggacacgctggacaaggaaacgacgccgtacatctatgtcagcctctacggcatccaatcggtcgacgacatcgacgacgccatccttcaaggcatgtatcccgtgctggcgaacaagggcgttgaactgggaggccgggcgctcaagtcgatcgggaaatatttcaacgtggagctggatctgaaagcgaaggacttcctcaaaaagtccaaggccgacgtctacgtgtttgacgatttggagcggtgtgagatgcccatcaacgccgtgatgggctacatcaacgtgttcgttgagcacgagggccgcaaggtcatcctcatcgccaacgagaacgaaatcgaagatcaaccaaagtacaagcggatacgcgagaagctcgtcggcaggacgttcgaagtgcagtcctcattcgaagaggcgctggacgggtttgtcgcctcggcaaaggatgaggcggcgaaaaaattcctctcctccgcctcctccaccatctcggaggtgtatcaccagtctgagatgaacaacctgagagttctgcagcaaaccatcttggacttcgaacgactttacatcgtcttggaagagaggcatcggaagaacgatgaggcgatgaaagccctgctggctctcctgttcgcgctctcatttgaggtcaaggcaggacgacttgccgcggacgacatgaagaatcgccagacccatctcttgtcttcgtacattcagaacaaaaaggacgactacgttccccccaagattgtcgccgtcaacaatcgatatccccttgcgcggatcgatgcggaccttctttcggacgatactttggttgacctgatcgtgagaggcatcatcgaccgccggaagctccgtgacgagctggatagcagttcattcttctttacggcggagaaggagcccgcgtggcgtaccgtttggaactctcatgagcgcacggaagaagagttcaatgtggcgctcgccgagatgacgcgggctttcgccgcgcatgaatacacggtcctcggcgagatacggcatgttttcggcattcagctccggctatcggggatcggtgtgacgaccgccagtcgcgcgcaggtggttgccgatgcaaagtcctatgtggactacctgtacgaccataaactgctcgaacccattgagccgcaccgagacagtttcgatgtcaatttcgatagctatgctggcttgggctacatggaagcctcctcggcagagttcagggaactctccgagtacctgaatcagaaacgccatgcggctgcggtcgatcgccgacccgccattgccaaagaccttctcacgttgatggtggaagacccaagtcagttcctgcgccggatctgcttgaccaatcacgaggacaatgagttctacgacatccccgtcctggcttccttggatgtgcgtaaattcgtagacgccttcctcgggcttcatcccgcaaagcagaaaacggtgatcttggcgctgaagctacgctatcaacaccgcatgctggaccgtgatctggaagacgaacggccttgggcaaccgaggtcaggagccagatactggcagccagcggtgccatgtctcccatttccaaggatcgaattcagcggctcatcgcctacggtcttgatgaagcgctcgattccgcaagaggagcttag

SEQ ID NO: 536367 - DNA, 282 bp, Stenotrophomonas maltophilia
atgagtacgggccggaagcttcggctcggtccgctgccgaagctggaatccactcgggtaaccttcgtctgcccggcggccctgaaggcggagctggatcgctacgcggcgatgcactcgcaggcctacggcgaatccgtcgacgccgcagccctcattccgctcatgcttgaggccttcatggacggggatcgcgggttccggcgaggcaaacacgcgtcccccgtagggcctaagctcctcttgcggaatcgagcgcttcatcaagaccgtaggcgatga

SEQ ID NO: 536368 - DNA, 1263 bp, Stenotrophomonas maltophilia
atgcgtcccgaggactccgctccggccgcgggcaaggtcgcccccgaggcgatgacgctgcgcgcaccgccgcgcccggtgacgcggttgaaccgtcgcaccctgatgctgctcgccagtggtctggcggtcgcggtgctcgtggccacgatgtggggacttcgctcgccctcacgcgaatcgagccaagcgctcgagctgtacaacgtggaccgcgtcgccaagcccgaggggctcgacggcctgccggcggactactccaagctgccgccgaaggctccggaactgggaccgccactgccgggcgatctcgggccggccatcctcgcatcgcagcagcccgtgacggccacctatcaggcacccggcgaagaccccgaggaggctcggcgcaaggaggccgagtcggcggcaggatcgtcggtgttcttccgctcgggagggcaaggcgctgcggccgcaccggcgacggccgcagcggcggccccgagtgcggaatcgtccctgaccggcttcgatcccctggcggcgggtccgcactcggcggccccccagccccacgatccgaccgcggtgcagaaccgtcaggacgagaaggaggcgttcttgcggaaaggcggcgctgcacaaacccggaattccggagatctgcaattggctgcgtcgccgtaccaagtcatggccgggaccgtgatcgccgccgcgctggtgacgggcgtcaagtccaatgtgccgggtgatgtgatcgggactgtgacggaaccggtctacgacacggccaccgggaagttcgtcctgatcccgcagggttcccgcgtgctcggcaagtacagcagccaggtgagctacgggcagacccgcgtgcaggtcgtctggcaccggatcattctgcccgacacgtcctcgctcaacttggacaacttggtcggcaccgatccggccggctacgccggactccaagatgaggtggatgggcattggggccggctgtttgcaagcgccgcgctgaccacgattctcggcgtcggcgccgaattggcggccccagagaaccggcaggacggcaatcgcgtcgtcatcgccggacgcgacagtgcgcaggacggggtcaaccagcttgggcaggagctgacccggcgcagtctcaacgtgcagccgacgctctccgcgcggccgggcctgccagtgcggctcatcgtgtcgcgtgacttggtcttgcgaccgtaccagccgatgttcttcgtgcgcgggagcctgccatga

SEQ ID NO: 536369 - DNA, 363 bp, Stenotrophomonas maltophilia
atgctggcccttcagcgcaaggcgcaggccgcgaacctcgcagcgcccgtggattcgggcatctcgctggaacagcttcggttccgctacaccatcagcggaagccagccgccgtggcgcccgctgcgcgccttcgacgacaacagcaaggtctacatccagttcccgccggggatcgcgcaaggcgagctgccgccgatgctcgtcatcggcgcgggtggcgacgggcagttggtgaactatcggttccgctcgccgtactacgtcgtcgaccgcctgttcggtgcagccgagttgcgcctgggcggcaagaaggccgacgtcgtccggatcgagcgcaacgaccaggcgcgggaggattga

SEQ ID NO: 536370 - DNA, 702 bp, Stenotrophomonas maltophilia
atgcgattcaaacgcccgcaggtgcgctatgccgacacgccgcaacctgtcaccccgtatcaaaccgccgcccaagtgtgggacaagcgcatcggcgaaccccgcgtccaggccaagaactggcgattcatggccttcggctgcttgggattggcgctgctactcgccggtgatcgaatccgcctttccacacagtcgctggtaacgccctacgtggtcgaagtggaaaaagaccatgtgcgcgctgtcggcgaggcaatcactccgtacaaacccacggatgcgcagatcgcgtaccacctggcgcgcttcgtgacgctggtgcgctcgctgtccatcgaccccatcgtggtacggcagaactggctggatgcctacgactacaccaccgacaagggcgcggcggcgctcaacgactacgccagcaaaaacgatcccttcgcccgcattggcaaggagtcggtgacggtgcagatcaccagcgttgtccgcgccagcgacacgtccttcaacgtgcgctggatggaacaacggttcgtcaatggcgcaccggctggcaccgaacgatggaacgctgtgctttccaccgtcctgcaaaccccacgcaccgaacagcgcctgcgcaagaacccgctgggtatctacgtcaatggcctgtcgtggagccgcgaactggattcttccgaaggagcaaagccatga

SEQ ID NO: 536371 - DNA, 264 bp, Stenotrophomonas maltophilia
atgaggaaatccatcctgctcttgctgaccatgctgctggctgcttgtagcccgtccgaaacacctaagcaggtcaaagtgccgacggtggacgaactggccgccgatccggcacgtctgaaggagctgcgtcagcaatgcaaaaccgatcgcgtgacgcttggtgacatgttgtgcaaccgggtggccgaggccacgcgcaagcggttctatggcgatgggaagacgccctacacgccatcggaaacaccgccgaagttctga

SEQ ID NO: 536372 - DNA, 867 bp, Stenotrophomonas maltophilia
atggaacagtcaccgctgtcgcgaacaatcaaggagctagaagaagacttgggcgaacaactgttcgtccgcaccagccgcagcacgcgactgacgcgggcaggaaagttgtttctggagcatgtgccgcgtgtgttctcggccttgcagcaagcccgcgacagcgtgaaggctgcggccaatggcttccacggtcaattgcgcattgcgttatccgatggcatcacaccatcacgtcttccggccttactagcaatgtgccggcaagaagagcccgaggtcgatattcgtttgttccaagtaccgctgtcgcagcagatcaaagggctgcaagacgatctgtacgacgtaggctttgcgcaatctgatgaagtcggcgaaggcatcacagccgaagcggtatggaatgacccgttgatggtagctgtaccggcccggcatcacttgctcaagcacaagcgcatcccgatggatgacctgctgcaattccccctggtgttgtgtgacccgcaagcgtgcgaaggccacgcacgtcaggttgaacgggtgctgcgccgttctgaccgggaaccactgattgccgagcgcgtcgcctcgttcgagctgatgatggtggtggtttcggcgggcttcgccctggggctggcgggtgggccgtacattgcagcaagccgggagactggcgtagtcgcccggcctttggccggccgatcgcccatgctgacgacctatctgcttcggcgcgaaggagaggtttccgaagtgctgtcccgattcattgagcgagtacatgccatcgactttcctgaaggcacgaggcacgttctaccacctgaacccaatccccaggaggaaaccgaaccatga

SEQ ID NO: 536373 - DNA, 921 bp, Stenotrophomonas maltophilia
atgctcgcggtgatcctgggcgagttctggctgctctgcctggctaccttcttcggcggcagctacgcggccgtcgtgttgtcgttccgctttgcagccgcagatggcgtggcgccgcagcggcgcgctcgtgcgctgtcactggtgatggcggggggtgtagccgctggggtggtagggccgcagttggtgactttcacaatggatttgtggccgccccacgtgtttgcagccacttttctcgtgcaggccgccgtcgcttttgcttcggccttcatcctgctcagtgtcaagctgcccatgcccactgcggaggaaattgcaggcgggcgctcgctcaaagtgattgcacgccagccgagcttcgtggccgccgccatctgcggcgcggtgtcatacatgctgatgaatttcctgatgacggccgcgccgctggcgatgcaccacgtcggccattcgcaagcctccgccaatctgggcctgcaatggcatgtgattgcaatgtatgcgcccagcttcttcaccggcagcctgatttcccgcttcggtgccgggcgcgtggcggcggtggggctggcattaaccggaatgtccgctgcggtcgggctgggtggtatggacgtcgctcatttctgggccacgttaatcctgctgggagtgggatggaattttggatttcttggggcgtctgcgctggtgctcgaatgccacaggcccgaggaaaaaacgcgcgtgcaatcgctcaacgatttcattgtctttggaatgatggccgtcgggtctttctcatcaggcggcctgttgtccgcttatggctggaacacggtgctgtgggtttcatttgctcctctcgccatttccgcgctggcgctggccgcagcgatggcaagaaacaacgctcgcgtagcgtcatcaaggtag

SEQ ID NO: 536374 - DNA, 1023 bp, Stenotrophomonas maltophilia
atgaaagccacttaccgcgccatgcaggtttccaatcctggcgtgctggagatggtggagcgcaggacgcccacgcccggcccaggacaggtgttgatcgcagtcgaagcctgcggtgtctgcggtgccgacgccgcagacatcgacaaggccgacccggccttgcagccgccgcgcgtgcccggccatgaggtcgtcggtcgcatcgtagcgctagggtcgggggttcccgctctctggacactcggccagcgcgtgggcgtaggccgattgggcggccattgcggcgaatgcttgcaatgccggcaaggacgcttccaactctgcatgaaccagcctgtcgtcggtagcagttgcgacggcggctacgctgaattgatgctggcgcgtagcacgggccttgttgccattcccgaagaactgcgctcggaagaagcagcgcccatcctgtgcgcaggcatcgcaaccttcaacgcactcaagaaatccggtgcgcaagcaggcgacacggtagctgtcctgggcatcggtggcctgggacacatggcgctgcaatatgcaagacgcatgggcttccaggtggtggccattgggcgcggcggcggtattgcggcggatgcgctggcacttggcgcgcacatctatatcgacaaccgggaggaagacgccgtcgccattctcaagagcatgggtggtgcgcaagccattgtcaccacgatcgaccatgccgaaacggcatcggccattctggctggcttggctcccgagggccgattggtcgtactcaatccagccaaaagcccgctgcaagttcctgctggcctgctcgtcggcggccagcgcagcattctcggctctatcacgggcacaccctacggcaacgagaaagcgttgaatttcagcgtgctggtggacgtgaggccgcacattgaggttctgcccctggagcaagcgaacgaggcgctgcgcaagctcaagtctggcgatgtcagataccgcatggtgctagccgtcggaaattga

SEQ ID NO: 536375 - DNA, 1107 bp, Stenotrophomonas maltophilia
atgcagaccacacgcatcgccatcgtaggaggaggtctggccggtctgtacgcagcacatgtgctggagcagaaaggcatccacgactatgtagtgctggaggcccgggatacatggggtgggcgtatttcatccacgccatcagcggtgggcgcttctccgcttgatcgctttgattttgggccgacgtggttctggcctgcctatcagccgcaactcgatcacctcatcgccagcttggggctggagcgcttcgcacagcccgaagacggagacatggttgtcgagcacacgcagaacgcggcaccagcgcgcatgcgcggctacgcttctgcatcgccgtccatacgactggtgggagggatgggcacgctgattgatgccttgcgcctgaaattgacaccgggaaatctcatcctcggtcagcgcgtgctccgtctgcgcagcgatggccgtcacgtggagctggatgccgagaatgcccaagggcggcccagcacctaccgggtcgagcatgtgcttctggccgtgccgccgcgcttggcgctggcactgatcgacttctcaccgatgctccccgaatcactggtgcgcgcttggcgcggcactgctacctggatggcaccgcacgccaagtacgttgccatctacaacgagccattctggcgtgcgcaggggctgtctggtgaagcgcgcagcgccagagggccgatgggagaaatccacgatgcgtcgatgcccggtggcggtgcggcgctgttcggcttcttgggcgttccggctcgtgtgcgccggggtgtccccgaggatgtactgcgctcgcactgccgagcccagttcgcgcggctgtttggcgaacgtgcggcaacccccgtggcggatttcatcaaggactgggctaccgacccttggacagccaccgatgcggatcaggatggggcaggccatcacgctgtcgcgcctgccgcgtcggttgccgaaggcccgtggcagagccgaatcacaggcatcgccagcgagtggtcgccgcagtttccaggctacgtcgccggagctatcgaggcggcagcggatggcgtcaaaacacttttggaacaacggtcatga

SEQ ID NO: 536376 - DNA, 468 bp, Stenotrophomonas maltophilia
gtgctgtccggcgttttctcggaagacggcatgcactacccggcaggctggtatctgcgcaatccgcccggctccagccaccaaccttccagccaggagggcgccgttatcttcgtcaagctccaacagatgcaagcccatgagcgacaagccgtgcgcatcgacacgcgggccggatcatcctggcatagcgaaacaggccgcgaggtttgtccactgttctcggacgaagtggagcagaccagcttgcaacggctggcgttgggcgaagccctgttcaccgtcccggtggatggagccgaactgctggtactgaccgggaacgtggtggtggatggcgagtcctatgagcgcggcagttggatgcgcttacccgcgggacagtaccccgaggtcgtcgccggcacccctggcacgaccctctacctgaagatctggcgccttggcgaaacgccgattgaggcataa

SEQ ID NO: 536377 - DNA, 342 bp, Stenotrophomonas maltophilia
atgatgcaagactggaattcgtaccgcgctgcgttgcaagagcgcgtaggtgatttcgcctcactgaatcctgatgtgatggccggcctggcgaagatgaatcaggccgttgccaagcccgggcacttggaacccaaggtgcacgagctgatcgctttggccgttgctgtgaccacacgctgcgatggctgtatctccgtgcatacccaaaaggccgctgagtacggtgcgacacgcgaggaaatcgcggaagcgctgggcgtggccatcgccctcaacgcaggtgcggcgctcgtttactccgctcgcgtgctcgaaacccacgcacagctccccaagtaa

SEQ ID NO: 536378 - DNA, 282 bp, Stenotrophomonas maltophilia
atggtttatttgcagatcactctcaagatcgccgatgccaaccgggctgctgccgctggtgtttaccagaagtacaaggcaccgttcctgagcaccgtcggaggcgcgcagtcgaaggaactgttggtgcgtaacgaggatgtgcaggtgctgcacggcttcgacaccaaagagaacgcccaagcctatctgcaaagcgagttgttcacgtctgacgtggtcgccggcctcaagccgttgcttgacgccgatcccgacgtgcgaatctatcaagtcgcgtaa

SEQ ID NO: 536379 - DNA, 774 bp, Stenotrophomonas maltophilia
atgagcaatcagttcaagggcaagaaactgctggtcgtcggtggaacgagtggcatgggcttggagacggcgcgcagagtgatcgccgaaggcggcagcgtgatgatcgtgggcaaccgccccgagaagaccgaggaagcgcgcaaggaattggctgcgctgggccaagtgtgggcgctgaccgccaacctgaccagtgacgagggtgtggcagcacttctcaagtccatcgacgagcagcacgccgacatcgacctgctggtgaacgccgccggcgtgttcttccccaagcctttcctggagcattcggaggccgactacgaccagtacatgaaactgaacaaggcgttcttcttcatcacccagaaggtcgccgccaatctggtcgccaaggacaagccgggagccatcgtcaacatcggctcgatgtgggccaagcaggccatcgcggccacgccttcgtcagcctattcgatggccaaggccggcctgcactccctgacccagcacctggcgatggaactggctcccaagcacatccgcgtcaatgccgtgtcgccggcggtggtggcgactccgatctttgagggcttcatccccaaggctgaggtgcatggcgcactgcaaggcttcaacggtttccatccgatcggccgcgtcggcacgcctcaggatgtcgcagaagccgttgtcttcctgctctcggacaagacgagttgggtgactggtgcagtttgggatgtggacggcggcgtgatggctggccgtaactaa

SEQ ID NO: 536380 - DNA, 717 bp, Stenotrophomonas maltophilia
ttgcgcgcactgcctgacatccgggccggctttgacaggctcaccttgggattggagcgactgagagagggagcgattggcggcgtgttgaccgttaccatcagccccgcattcgccgccaagtggctgctgccgcgctttgagcggttccaagctatctgccccgacacggatgtgcgccttgaaaccaatctcaaacccgtggacttcgtggcccagcgtgtggatgtgggggtgcgctacggaaatggcacttggccgggattaacggcggagaagctgatgggagaagaagtcttcccagtatgcgctcccgagttgcttcgacagcatcagcgtttgcacacgccgccggagcttggcggtgtcacccttatccacgacctgtcgatggacggccatgtgggctttccaacctgggaaaaatggttcgcaaaggccaatctcgttggattgaccacctcgcgcggtatgaagatcaataactcggcagcggtcttacaggcggcgatcgaggggcgtggcgtggcgctcgcgcgcagcgttatggcgcacgatgacctggctgctggcagattggtgcgactgttcccggaagttcagttcgagtcggagctggcttattacgtggtgtatcgccccgagtgcgccagtttgccaaggcttgttgctttccgggattggctgatgaacgaggcttcatcgcaaatcgagtag

SEQ ID NO: 536381 - DNA, 681 bp, Stenotrophomonas maltophilia
atggatatgtctgaagcctggcaagccatcaaagacctcagtagggaagagtttgaggaaaggatcaagcaccaaggattgcccgaagctcgaaaggatttacttttcaaattcatccgaggggatattcaggtcagttatagttgcaaacctgacattgaagcctatgtgctcaaatacttgatgccagaattttacgaatctattccccataaagggcatccatattcaagcaacgaactttatgaatatgatccaccgaagaatgggcagaatatcctcaagcatggcattggatttggcgaggtcgttagctactcaagaaaattcggaacattgttagttcccatccctaatgaagtagatggtgaaagatgcgtaatcttctctgacctggatctaaaacgcgatggagatgagctagaaattcctccccctggcatcagggagatgaactacaccatttctattgcgaaccatagaaacggaaaattcagatttatttccgcaaggattttgagttcaaaaaagaaaaaatacgaggaaaccatagcgcaggttctcggagagataattcccgacgaacaggcaagacgaagttttatcgaccgttgtgtggaaattctagaagaaaacctgattcagcctgcatcgctaggttcggaaagcggagcgccttag

SEQ ID NO: 536382 - DNA, 909 bp, Stenotrophomonas maltophilia
atggccgcacttgttcccgagcttgtcaacatggcaagcgaacctcacatctctactgctgacctgctacgcaaggcgctggtagtcgctcgtcgtttagcagttcaggaacttgtgacttggattagttctgaacttaatggctacaacgacagcgaggttccagaatatcggaaggtggttggacagcttcatgcggagaacccatataggggcggaacggttccgttcatagttccgcaagaaattgcagaaatcgtgacgctcataccgcttgcacagcccctgccagaacttcagcaattggccaagagcgacacgctgctcctccgctacttcccggcggatatggagcgaatactgatgaacatgatgatggaaggatcaggtagcgctacgcgccctttggtcaaatttacgcccatccaaattggtggcgtggttgatcgcgtgcgaagtcgtattcttgattgggcgcttgacctcgaaggtcggggcatcattggtgaaggaatgtccttcacgctggaggaaaagcaagccgtgcaagaacagcactaccattttggcaatgtatcggggtctcagattcagatcagttccaatggatcgacgcaggctcaaaccaacactaattcgagccacgatcttgaggccgtcaaggggttgattgatgcgctgggagctattcttgaccgtggagcggtgcctgatgatgccgtcgatgagatgcgcgccgagttggctaccttgaaggcgcaagcggcatctccaaagccaaagtgggaaatcatcaaagcgaccgctcggactatcaagaccattgccgagggtgcggcaggcaacatcttgggcgagttggcaaaacctcacgttgtaacgcttttggctcttgctgctggtgcctga

SEQ ID NO: 536383 - DNA, 141 bp, Stenotrophomonas maltophilia
atgggcgaaatcgacggcatcgcccggggtgccgagcagaaccaaaaaaatgcggaactcccccagatggacaccgtggtgtccatctgggggtttctcagcacgggcaccttccgacgcctacctaacatcgattgctag

SEQ ID NO: 536384 - DNA, 2103 bp, Stenotrophomonas maltophilia
atggaaaaactcacggcagccagcccagaagcccaatccgccgacctggtggcgggcaatatcgaacaactcaaggcgctgttcccggaactgatcaccgagggcgcgaacggcgtagccgtgaatgtggacgtactcaaggccctggtgggcgatgccagcgtcaccgatgccgatgaaaaatacggcctcaactggcacggcaaacgccgcgcgcggcaactggcgctcacgcccagcaccggcaccttgcgcccctgcccggaggacagcgtggactgggataccacccagaacctgatgatcgagggcgacaaccttgaagtgctcaagctgctgcaaaagagctatgccggcaaggtcaagctgatctacatcgacccgccgtacaacaccggcaaggattttgtctacccggataattttcacgacaacatcaagaactatctggagttgaccgggcagatcgaaggcggacagaaaattagcagcaataccgaagccagtgggcggtttcatacggactggctgaatatgatgtatccgaggttgaagctggcgaggaatctactgcgagaggatggggtaatcctgctcagtatcgacgagcatgagatcacgaacctgcgctctgtgatggatgaagccttcggtgaagaaaattttctatcctgccttacatgggaaaaaggccgaaagaatgatgccaagtttttttccaacgggcatgagtacgttcttgtctacgcaaaatcgcagagccaccttcgagagaagaacacgctgtggcgtgaagaaaagccgggcgcccgagacatttggaataaatatctcgaactgcgtttccagcatggaacccaagacaacctgatcgaagcggggctgcaagcttggtattccgacttgcccaaagcgcacccggctaaaaaatggagccgttacaagagagtggataaaaacgggccgtggcgggatcgtgacatttcttggccgggcggcggtgggccgcgctacgatgtccttcatcctgttacaaagcagccatgcgttgtgccggaggctggttggagatactcatcttccgatgaaatgcaacgccagataaaactcgggcttgttgagtttcgccaagaccacacggagccgccctttcgcaaggcacacatccgcccgatccctcaggagcttgattcggtcgattcgactgatgttgatgcgcctgaggaaccagccgatatcgaggatgaagaagaattcgcaactcaggtgaggggtagctacttctacaagcaatcccaggtttcggtgaaatatctccgaaccctattggggaagaaggtcttcaacaacccaaaggatctggacgagattgcgaaactgattcgctacaccacgtctgatgaccctaatgccgtggtgctggatttttttgcgggcagcggcacgacgggcgaggcgacgatgcagttgaacaatcaggacaacggaagcagacgctacgtgcttgtccaacttccagagtcgcttgacgcaagcgacaagcagcaaaagattgctgcaaagtactgtggagaccttggccggccgctgaatatcgctgagctcaccaaagaacgcctacgccgttccggaaccaagatcaaagccgataaccccgactggcagggcgacatcggcttccgcgtcttcaaactcgatacctccaatatccgcgcctggaactcgaagccggacgatctgggagcctcactgttcgaccatcaggatcacctgctcgaaggccgctccgaggccgatgtgctgtacgagctgctgctcaagctcggcctggacctgtgcgtgcccatagagcagcgcagcatcgcgggcaaggcggtgcacgccgtgggcggtggcgtgctgctggcctgcctggcgcaaaccatccgcgccgccgaggtcgaagccctggccgatggcattgctgcctggcataaggaactggcccccgccggtgacactacctgcgtattccgcgacagcgcctttgccgatgacgtggccaagaccaatatggcggcgatcctgcaacagcacggcatcgccaccgtgcgcagtctttaa

SEQ ID NO: 536385 - DNA, 1155 bp, Stenotrophomonas maltophilia
atgcaagtcacccgagtcaaattgaagaactggcgcaacttcagatcattcgatgcgccgatgcgcgatgtgacctacattctcggcccaaacgcctccggtaaatccaacttgctggatgtgttccgtttcttgcgcgatgtcagcaaacccgcaggcggtgggcttcaggcggcggtgatcgaccggggcggaatcagcaagctgcgttgtcttcatgcgcgccgcgatcctgaggtttgcattgatgtcgagctttcggattctccggatgatgaggttccaagctggcgctatgtgctgggcttcaagtcagaaggcaagggcgcgcaacgtattctggtatctcaggaagaggtctggcgcgaaggcaagaagctgttttcgaggcctgataaggacgatagcaaggatgctgtgctgctgacccaaacgcgccttgagcaaattgctgccaatgcggaattcagggagcttgcggagttcttcggttcgatcacttacctgcatctggtgccccaactgctgaagttcgctgatcggctgggtgggcgacccttggaaaatgacccctttggccagagttttctggagcgaatcgccaaaacaacggaacgtgtcagaaatacgcgattgaagaaaatcagtgaggccttgacactggctgttccgcaattcagggaattgcgcttcatcaaggatgattcagggcaccctcatcttgaagccctgtattcccatcacaggcccaatgcagggtggcaatcagaggagcatttttccgatggcaccgtgcgcttgctcgggctgctgtgggccctgctcgatggcagttccatgctgctgcttgaggagccggaaatctcactcaatgatgcggtagtgaaagaaatcccactgatcattcagcgtctgcaaaagaacagaaagccaaagcggcaagtacttatcagtacccatagcgaggcgttgctcagtaatccggggatcgatggccggggcgttattctgctggaagccacggcagatggctcagtcgggcgaaccctgcaagaagatgaagcgtcagcactcgaagcagggctatcagtggccgaggtggtactgccaaagacacgccccagctcggtcaatcagctgggattttggcaatga

SEQ ID NO: 536386 - DNA, 615 bp, Stenotrophomonas maltophilia
atgacagcggttgccttggccactgaagatgagctcagtgaggcggtaggaatgaagctgttatcagagcatccggttttggtgaaaacctcgccaatgttgctgagaaaaaatggtttcggatacttgcgctcacacatggatagctggcggcagatggccaatcgccagatcgtggtcgttctgaccgatttggacaggttggcctgcccactgcttctgcttgaagattggttgggtgctgaccggcaacatcctgaaaacctgctgttgcgtattgccgaacgagaggttgagtcatggctgcttgctgaccacgaggcacttggaaagctgctgggcagtaaagcccggtttccggtgcagccggacacgttgccagaccccaaacagcatctactcgggctggctcaaaaagcacccagagcagtgcgagaggacctggtcgctcaacagggagccgttgccaggcaggggattggctataaccgccgcttggtggactgggtacaggccgagtggtctccggaaagagccgccgctcgttcgccaagcctttcacgagccagaaacgccatgggcagagtcgcccacagagtgatacaggctaagtaa

SEQ ID NO: 536387 - DNA, 3051 bp, Stenotrophomonas maltophilia
atgaaactgcactttgaacccgatctcgactaccagctccaggctatcgaagcggtctgcgacctgttccgtggccaggaacagtgccgcaccgaatttaccgtgaccatgaagctgccccagccggcaacggatctcttctcttctcaagaggggcacggtagccagcccgagcaaatgaccctgggcatggccgaaaccgacctcggcgtcggcaaccgtttgacactgctggacgatcaactcttgcacaacctgcgcgaggtgcagttgcgtggcggtctggcgccgtccggcgtgctgagttccggcgacttcaccgtggagatggaaaccggcacgggcaagacctatgtgtacctgcgcacgattttcgaattgaacaagcgctacggcttcagcaagttcgtgattgtggtgccgtcggtggcgatcaaggaaggtgtctacaagaccctgcagatcaccgaggagcacttcaaggggctctacgccggcgtgcccttcgattacttcctgtacgactcggccaagcccgggccggtgcgcaacttcgccaccagcgccaacatccagatcatggtggtgacggtgggtgccatcaacaagaaggatgtaaacaacctctacaaagagagcgagaaaaccggcggcgagaagcccatcgacctgatcaaggcaacccggccgatcatcatcgtggatgaaccgcaaagcgtggacggcggcctggaaggtcgtggcaaggaagcactggacgccatgaacccgctctgcacgctgcgctactccgccacccatgtggacaagcaccacatggtgttccgcctggatgccgtggatgcgtacgagcgcaagctggttaagcagatcgaggtggcatcggccacggttgaggatgcgcacaacaagcctttcgtgcgcctggtgaaggtggaaaacaagcgcggccgcatcagcgccaagatcgagctggataaacaagccgccactggcgtgcagcgggtggaggtgacggtcagcgatggcgacgaccttcagcagagcgccgatggccgcgcgatctatgccgattttcgggtgggcgagatcaatacggccaagggcgaagagttcatggaactgcgctaccccggcggcgaagtgttcctgcagcctggccaagcccacggtgatgtggatgcgctggccgtgcaacgcgagatgatccgccgcacgatcaaggagcacctggacaaggaaaagcacctgcgcccattggggatcaaggtgctcagcctgttcttcatcgacgcggtggacaagtaccgtcagtacgatgcggacggccagccggtcaagggcgtgtatgcgcagatgttcgaggaggaatatcgccgtgccgccaagttgccggcctaccagagcttgtttgccgagatcgatctggcgtccgccgccgaagaggtgcacaacggctatttctccatcgacaagaagggcggctggaccgacaccgccgagaacaatgcgggcaaccgggagaacgccgagcgcgcctacaacctgatcatgaaggagaaggagaagctgctgtccttcagcacgccgctgaagtttatcttctcccactccgcgctcaaggaaggctgggacaaccccaacgtgttccagatttgcaccttgcgcgacattcagaccgagcgcgagcgtcgccagaccattggccgcggcctgcgcctgtgcgtcaaccaggatggcgagcgggtacgcggcttcgaggtcaacaccctgactgtggtggccacggaaaactacgaacagtttgccgagaacctgcagaaggaaatcgagaaagacacgggcatacgcttcggcatcgtggagcagcaccaatttgccgccattgccgtgaccggcgctgatgggcatgccgcaccgctgggcatggagcaatcgaaggcactgtgggagcacttgaaagctgccggccatattgatgccaagggcaaggtgcaggattcgctgaaaacggcgctgaagaacggcaccttggagctgccagccgagttttatgcacagaaagcccagattgccgaagtgctgcgcaaggtatcgggccgactcgacatcaagaatgccgatgagcgcaggcaagtgccgctgcgcaagggcaaagatggcaaggccgtttatctgagtgacgagttcaagacactgtgggaccgcatcaagcaccaaacaacgtaccgcgtgcagttcgataacgccaagctggtgacggattgcatcgcagcgttgcagaaggctccggtgattgccaaagcgcggctgcaatggcgcaaggccgacatctctatcggcaaggccggtgtcgccgcgacggagaaagcgggcgcggcgaccgtggtgctggacgaggcggatatcgagctgccggatttgctgaccgacctgcaggatcgcacccagctcacccggcgcaccatcgtcgtcatcctgacgggaagcggccgcctggacgacttcaagcgcaatccgcagcagttcatcgaattgaccgcagaaactatcaaccgctgcaagcgcttggccctggtcgatggcatcaagtaccagaagctcggcgaccagcatgtctatgcgcaggagctgttcgagaaggaggagctcaccggctatctcaagaacatgctgctggatacccagaagtcgatctacgagcatgtggtgtacgactcgaccacagagcgggacttcgccgatgggctggagaagaacgacgccgtcaagctctatgccaagctgccaggctggttcaaagtgcccacgccgctgggtacctacaaccccgactgggccgtgttggtggaagaagacggcacccagcacctgtactttgtggtggaaaccaagagcagcctgtttaccgacgatttgcgcgacaaggaaagcgccaagatcgaatgcggcaaggcgcatttcactgcgctgggggttggtgagaaccctgcacgatatgtggttgcgcgctcggttggcgatcttttgaccgaggcggcaaaaggatag

SEQ ID NO: 536388 - DNA, 180 bp, Stenotrophomonas maltophilia
atgaccaatcgcaccgccgaccgtccccgcctgcacgccctgatcggcaacatcgccgccgacgtgcctgaagagctcgcgcacgagatcgagtgcgccttgcaggaacagaaccttgcccgtgcagtcgcccacgttcttcgcctgcctcaatgcgatcagcaacgccgacgccgatga

SEQ ID NO: 536389 - DNA, 249 bp, Stenotrophomonas maltophilia
atggggaagggagtaaaacttgggctgttcgcgctgtcgactgcgctcgctatatcgctcgggctcaatgcctacagcctgtggttgattgaggacatagagtcccgccttccaacctcagtggaggaccttgactggcgataccctggctacgcagatgacatcgaaactgcgaagaccaagatcgacgccctggaggaacgagccgacgatctcgaatcgaagatccggaacctgcccctttactga

SEQ ID NO: 536390 - DNA, 354 bp, Stenotrophomonas maltophilia
atggcactgagcgaagagcggttgaaggaactggctagccgtatggcaaaggcgatgggtaccgaaacacccacgtcacgcccgcatctgcgccttgtgacatttcccacgcgcgcccggcagctggacgacctgaccagggaatcccattgccgcatgattcggcacctgcggcgccgctggggctactcgatgcaactgatcatcgaccaagctacgttcggcctcgccggtatcgagcagctggaggatgaacagctggtccagctgcatcgtgatttggagcgcgcacaagactgcatgcgcgaaggaatcagtttcgaggacgcagggctgcttcaggcccatttctaa

SEQ ID NO: 536391 - DNA, 315 bp, Stenotrophomonas maltophilia
atgaccgaaacggtgttgaccggccataaccaaaacggtaatgtgccgagcatgaacctgaccaactacgcggtatccaagggtggaaccgggacgatcaagtgcccggttctggaatcggtgtccaaaaaggcaggctgcagtgccgcgacgctgtatcagatcgcgctcggcaacaagcagcccagcgcgaagcttgcgaacgccattcacagcgccacacgtgggcgagtgacgcgcggcgaactgcgcccggatgtcttcgttcaatcccaacctgctgggcagaccccagaaaccggggctgccgcctga

SEQ ID NO: 536392 - DNA, 240 bp, Stenotrophomonas maltophilia
atgtcttcgttcaatcccaacctgctgggcagaccccagaaaccggggctgccgcctgatatggacgcccggatcttccaccggctgaaccctcgcatctggctgcgtactgccttccgggccgtgttcggctggctgatgcggtcgagcgcgcgggagagggcacagcagagcctcgcccgccgggcggtcgacgagtacgccgattcgatcggtgtgcccacgaggatccgtcgatga

SEQ ID NO: 536393 - DNA, 219 bp, Stenotrophomonas maltophilia
atggcaaccggattcaagcttagggatggtcggctcctgaatgttgatcagatcgtgctggtgaccgtacccgaaattacccctggaagtggtactttcaccatcgagttcagcaactcgaaaaccatcgtggtccgcggctcaggggaggaagtgcggagggagcacgacgatcttcgccgcgcgatgggcattcccgataagagcatgattcgctaa

SEQ ID NO: 536394 - DNA, 480 bp, Stenotrophomonas maltophilia
gtgcatagcttccgccaccacgatcacgggtacatcagcccgtgccacattccgctgaagcgcagcggggacgactgctcacttgaccgtgatggctactcccgagccagcgtcgccgccgacagatcgcagcgcatgcaccgcctggtctatcagcggctgcacggccaggtgccggtcggaatggtgctggatcacctgtgcggcaaccgtgcctgctgcaacccggctcacctggaagcggtcacccaggccgtgaatgtgcgtcgcagccgcaggacgcgcctgagccccgatcaggtcgagcggatcaaggcgctgcgcgagggcggtatggggccgacggcgatttcccggctcttcggagtgagccagggacacgtgtcgagcatctgcgcagggaactactggcgcaccgacggctcgccgtcctatcgaaccatcaagctgcggcaggccaaagcctgtgccgggcagtaa

SEQ ID NO: 536395 - DNA, 5898 bp, Stenotrophomonas maltophilia
gtgggcgccggccagttctcgcctgacgccatcgccaccgcacagcgccaggcaaccagccttggcgtaccggccgacgttctggcgcgcaacccggaacaggccgcgcgtatggagctgcagcgcaagatagacggcgtgcgcgagcgcaatcctgccttggccgactggctggcagatcctcgccaactgggcttggtgaaggatgaggtggacggcgtcgagaagttcgccggtacgctgtccaagccaaagcagcaggactgggcacaggagctgctggccaacatggtctccaccggcatcggcgtgtacggccatgtcaaccgggcacgcaccggcaagtccacgcccgaggacgttgagtcgtccactgacgtcctgcggtcgctgccggctggcgccgtgcgtggtatcggtatggcagtgggcggtgtgggtgagacctacaacctgggtgagcgcaccttggatcggggtctatcgggtgtgggtgtgtccagcggcggcggccctgctcgcagcgacgtgccgatctggctgcggccgggcgattcgtttgtcggtaccggtcagtatctgaagcagctggccgactggatcgccccaccgaagcaacggcagacgttcggcacacaggtggctgaaggtgtgggccaggtcggtccaatggtcatccagagcatttacgccccgcaaaccttgccggccagcacgtatggcatgggcgtggaccagatggcggacgcggttcgcgagaagggtgcctacggtaccggtcggggtgatttggccatcgccaccggtggcttggcgcagggtgcactggagcgtctgggcatcgagcggctggtggagcgcctgccgccgaacatccgcagcagcacgatgcgctacatcgccgacatcagcatcgcggcggcgaccgagggggcgaccgaggcagggcagcaggtggcccagaatgcggcgctgcaggcgttcgtggatccgaagcaggccctgactgagggagtcgccgataacgcggcacagggcggcgctgtgggcgcgatcgttcgagcgctgctgggaatccccggcgtgccgcggtcgcgcacgcgcgctgccgccgagcaggtgcagaacatcatcggatcgcaggacaccaacgccgaactggcagcggcaacccaggccgcagcagagctgaagctcggcgcgcgctcgcctgatgacatgcgggcgattgttcgacagctggtgggcgaagattcgaacctctacctggacgccgagcaggctcagacgctattccagtctgcaccacaggttcttcagaatctcgtgggcggacaggaggcactggccgagcagatggcaaccggccagatcacgatctccaaggcggactggatggccgctgttccgcagctaccgaactggagcgagatccttcaacacacgcgaacgacgccggaaggcctgtcgccggccgaagtggaagggctgaatgtcgaagcgatcgcccgggagctgggcgtgcaagaggatgggcaggagtccgttgattccgcgcagctcgacaccgatggggtccgacagtccgtgttggcgcagctcgctgccaccgagcgatacacacctgcgcaggcggacagccaggcgcggctttggcaagcagtgttcggtaggttgggggaggtgaccggacaggaccctatggccctgtacgagcgctactccgccggcatccagattgcagatgccccggcagagggtggcgcaccgcgtgcaccgcgtaccctgatgcagcggggcatggacgcactgcgcggcctgttcggccggccgcaggttgccaccgacgcccgtggccagcagaccatcgagcgcgacggtagcacctacgtgcagcgggcggggcagtggctgctggccgacgaccagggtcaggcccgtgacttcctcaccctggaccaggcgcgcacggaagccgagcgcaccggcggcgagatcgtgcaggacgacccgatcgaaggcctgcggcagacttggagcgtggcgctgccagacaccgctgcgcgcgaggtgctggccggcgacatcctgttccagggcggcgcagctccgcgcggtcagatccagattggccccgaccgggccatgcagatcagtctgttcaagggcgcggacctgtcgacgttcctgcacgaatccgggcacttcttcctggaggtataccgggacctggccacggccgaagatgccgcgccgcagttgcggtccgacctcaatgcgctgttgaagtggttcggcgtagaatcagcggaccagatcggcgtcgaccagcacgaacagttcgcccgcggcttcgaggcttacctgggcgagggcaaggcgccgacgccggagctgcagtcggtgttcagccagttcaagcagtggattctcggcatctaccgcagcctgcagaacctagacgtcgcgctcaccgacgaagtgcgcggtgtgttcgaccgcatgcttgccagccaggaggagatcgaagcggcacagtcccgcatcagctacgagccgattgcgcgcgacctggccgaagcacaggcgatgggcatgaccgagcgccagttcgctcagtaccaggcgcaggtcaccgcagcccgtgagcaggccgaggccgaccttatggcgaaactgcagaaggctgatgcgagagcacgtaagcagtggtggaaggaagagctggcatcggtgcgaaaagaagtcgctgccgaactgaacgtcgatcagaccgaacgactggccagagccctgtctggtgcagagacctatcccgatggttccccaattcttgagacggaccgcgcgcacctggatcggcagacgctggttgatggttggggcgaatcgatcctgcgtcctctggcgggcctgtatcgcaatgaaggtggggtagcccctgagatgctggcgccgcttcatggtttcggatccgctgatgcgctcgtggaggctctggcaagcagaggtgagttaaagaggcggattgctgccgaggcggatacaaggatgcgcgagaggcacggcgatcccatgacggacgggacgcttcccgccgaggctatggattcgatccataacagccgccgcatccagctgctggagcgtgagcttgcgatcttggccgacttggcccagcagccccgcccgaatcgtcgcgagctgaaagctgtggctgaggctgtgattgaacgaaagtctgcgcgacagatgcgacccaatgcttacctcattgcggagcgcaatgctgctcgtgctgccaccaaggcggcggcaaagggtcgttacgcagaggcactgctggccaagcgtcagcaggccctgaatgccgcactgtatcggagcgcgatcgaagcacagaagcgcctgactcgcattgaacgcgcagcgacacagctgactcgcacgccgggacaggaacgtctcgccaaagcaggaagtggcttcctcccccaggtcaacggtctgctggcagcgtatggttttggcaaggaagcacctggtgattcccgggctctggcggactgggtcgaaggcctgcaggacagtggagaggtcacggcggtaggggatgccgtcattgcgcgcctggacaaccccgctgagtttcgcgacgtgccgttcgcagaggctcgggagttcgccgaggcgatcaaaaacctgtcccatttggccagccggcagaaccagctgctggccggtgcacggaaggcggacaaggccagcgccatcgcggagatgctcaaccgttcaacatcggtgctgggcgaagccagagagttcgttactgccgatgaccttccggcaggtgcgcgggcagcaaggactgcgagcggcctgctcgatgacatcgatcgtccggagtccatcctggagaagctcgacggcggagagactgggccgtggcacgacttcatctggcacgcgcaggagcaggcggaatcaaagaagagcgagctgatgcggcgagttggcacccagctgaagcagctgcacgctggcctgcccaagaactgggaggataacctgcggcaggtcgcgaccttcaagggtgttgcgatgacccgtcggcggctgatcggcatggccctgaacctgggcaacgccggcaatcggcagcgcttgatggagggtggattcaccaccagcaccaggacgatccttctgaccgaaggcgacctcaactcgctggcggcaatgctgagtccaactgaactgcgctatgtccaaggcatgtgggatgccatcgggtccatgcgcccggacattgaggccctgaacgcaaggatgggcggcgtgccgatcaagttcgttgaggccgtgccgttcgacgtgcagatgcctggcggagaagtcgttcacatggcgggcggttatttcccgctcgcctatgactcaacccgctctgtggtcggcgacgttcaagcgaacgaggacgccatgaaggtgctgatggccaccggagccggccgcgcggcaaccagcaagggctacgtgaagggccgtgccgagacggtcaaggcagcgctgaatctggactatggcctggtcgtgaatcgacatcttgatcaggtgataactgacctttcctatcgcgaggcggtccgtgatgtgcacatgctgctgaatgatccgcgcatcaagaactacgtaagctcgcgcctgagcccttcagcgctgcgctccctcaccggtggcctggcctattccgttgtcggcagcaccgaggccgctggcaacgtggccaagtggcgtgcgctgggtgatgggctgctggccaacaccacggttgctgcgctggcgctgcgaccggacatcgcgctcggcaactatggttcggcattggtgcagggcatcgacaggtcgagtacgtcgtccgtgctgcgatcgttcgcaaagttccaaacccatcggagtgaactgacacgggagattgtcgaaaagtcgcccttcatggcagcaaagttgcaggaggtcgatcacatgtacgcgaccaccatcggcaagatccgcggcgatcgatggaagggagcgcatgccggttacacccgcttgatgatgacgctgcaccgcttggccgatgctgacgtgtcgcgcgtggtctggctggctcgctacgagaccgagcgtcgcaaggggacgcctgatgtcgatgcagtgaagctggccgacaaagccatccgcatgacacagacggccactggcaagaaggacctttccaccttcgagcgcgatccggcattgcggcagacccgccagtacatgggcccgatgttcgtcatcttcggcaggctccgcgccgcgaccgaaggcagcggtgcatcgcgcgaagggtcagctcgaatcgcctcgttgttcttgcagtgggtactggcacccacggtgttcgcaatgctcgccggccgcctggcagacgatgacgacaaagacggtgagaaggactggatcacctggatggtcacggaagtggggttgttccccttgcagaccctgccgctggtgcgcgatgttgcatcaatcgccgagtctctgctggcgaatcggccaccgaacgctcgtagcgcaccgctggcgactgcgatcaacaacatgggcaaggcaacgaagcgcatcgccaagcgttgggacagtggtaagtccttcggcgacagctgggatgagtacacggtcgacctgttgcaactggccggcccgctggtcggtgcgccgtccacccaggccaggaagtgggacaaggcgtacaaggaaatctgggacgacccggacactggagcgctcgaactcacccagatggcggtctatggagagaccccgttctacgccgacggggaggtgttgcccgacaagaagaagtag

SEQ ID NO: 536396 - DNA, 240 bp, Stenotrophomonas maltophilia
atgaccctcgcgttcctctgtgtcgccatcgcctttgccgcaggcctggtcggagccacgcctaagcgagccgcgctcctgggggccgtggccggcatccttgccggcacgatctacttccttgtggaagagaactacgtccactacagccccgaatgggagtacctgccggcaactgctctgctaccttgcgccgcctccgggctgttggccttcgccgtcgccaagctgaagcggtag

SEQ ID NO: 536397 - DNA, 294 bp, Stenotrophomonas maltophilia
atgctgctgaagcttgccgacgctctgggggttaccccggaattcctccgaaagggcgaagacttggtgcatgtcgacatggttgacccggatggtggccgtataccgatcgcattcccagcgtcggagatggaccgcatccgccatgccgccaaggcgagcggtcgaacggtcgaagaagaaatcctcagcatggtgctgaacggaattcgagcgcttgaaggcgaactcgagttagccccagggcaactacctcctacaaaaccaaaatcaaagcgcaactccaaggactga

SEQ ID NO: 536398 - DNA, 150 bp, Stenotrophomonas maltophilia
gtgagcaaagagcaagtggttctggttgtcccggcggagctgaaagcctggttgaagcagcaggcacaggccgagtcgaggtcggtcaacttcatcgccacagcgctgctgatgcaggccaaggccgccaaggtgagggaagtcgcatga

SEQ ID NO: 536399 - DNA, 519 bp, Stenotrophomonas maltophilia
atgaacggcctcgaccacgcgtccgaggtggtcatgctctcgggcgatcatgtgatgacggacagccggaaggtggctgaggcatttgggaagcggcacaaggatgttctgagggcgtaccggaatctccagtgcagcgaggatttcacacggcgcaattttgcgcagtgctttgaaatcaatagcttggcgaacgggaagccatcccccctgatccagatgaccaaagacgggttcatgttcttggtgatgggtttcaccggcccgaaggcgggtgaaatcaaggaggcgttcatcgccgcgttcaacgagatggcggagttcgttcgggcacaggctgatggggcattgcagcgctgggaagtcgcctatgtggaataccgcgccgacctggagcatgcctcccggtgcgggaaggatctctccatttggcgaggccggcggctcgttcaccttgccaggctggagaaattggacccccagatcaagctgccgctgctcgcgagtgaagcagcatga

SEQ ID NO: 536400 - DNA, 294 bp, Stenotrophomonas maltophilia
atgagcagccgcccatccctgaaaaagagaaacgccccggcggcaaccgaggcgtttcagaaatcgacttccagcgaggaaatcatggcgaagactacacgcattctgggcgcagtcaaattcgaacgctcggtcaccgaggggcgtggatcgaccaacgttgtcccattcccactggaccgagcggtgaacgttcgcggccgtgagtcgttcaacagggtgatggctaggtttccaagtctgagaacggaacaggcttgggagttggtgaacttggcttggaaaattgcttga

SEQ ID NO: 536401 - DNA, 1545 bp, Stenotrophomonas maltophilia
atgacaatctctgcaaacgaccgccgcaagacctacgtggggaacggcgtcgccaccgcgttcaacgggccgagggcgttcctgtccagccacatccaggtgttcaccggcacgcacccggtctacaacctggtgccgccgtcgcagtacacggtgaccgggcttcgggcgaacgccagcactgtcacgttcaacgcagcgcctgccttgaacctggacatcctgatcttgcgcacggtcccgatggaccagcccacggacatcaccaatcagggcgcgttcctgccggagatccacgaagacgctttcgactaccgggtgatgcagctgcagcagctgttggacaacggcatgcagctggtccaggacccggttacgggcgagttcgtctgggacgccaagggcagccgcatcaccaacgtgggcgatgcggtgcaggtcaccgatgccgtcaacctcgggatcgtgctcaacctcatcgagcagatccagaccggcggcggtggtgtgggtgtcgaccccaagttctggacgtttgagggcgacggcgaggtgaccgacttcccgctgcctggtgccgacgtcttcgatgccctgttcttcgacaccgcgcttgaagccaccgcaggcgcgggcgactatctggtgtccaaacccagcagcgccacggatcccggcgagtaccggatcctcgaaggggttggggaagcgccgcctgcgatccgatttgccgttgccccgggggacggtgtgcgcggcttcacaacccttcgcggctacgccaggccgtggatcggtcagccgccgatttacaccgttgccccgcgcatcgtgagcgtcacggccgatacgacgctggccgtggacatgcacaacaccttgatcctggccaactcgcccacgccgatcacgctgaccatgcgcgccaacacaggcggcagcgcggactggaaggatgggcagttcttcaccgtggttcagatgggagcagggcaggtgacgctggttgccgagggcacgggccaagtgatcgccgccacgggattcagcgcaaagacgcgtgcagtgggctcccctgtcagcgcgtcgtgcctgtccccggacgccggcacgtggttggcctcgggcgacatgctgcgcaccacgtcgacgcctgatcttcagtgcttcgagttggtcgaccgcacggtgttgctgggcactaacatcgccaccggcaacaccaaggacagcctgttcctgccctatggactgctgctggacaccgtggccaacggcggaatctacgccacgctgaccaccgcgcaggcgtcagggacacccttgacgatcgacgtaaaccgcaatggcaccagcatcctttccacgaagctgacattcgacaacaacgagcgcacgaccatgacggcggccacgcctccggttctggtggccggtggtgaggtgttggccaagggggacgaaatcaccatcgacgtagaccaggtgggcaccgccttggccaagggcctgcgggtgtacctggtcggccagaggtccagctga

SEQ ID NO: 536402 - DNA, 1467 bp, Stenotrophomonas maltophilia
atgagtacgcacatctacgacaggcccgacttagatcaggtgaatggtcggttgccgctgttcatcacgggctcgtttgcaacggggcgccccgtccaggcctacgaggggcgcctgcaggtgcataacggcatcgggggtatgacggtggagaagatcgacggagacccgctgccgaacggttacagcctatacatggtgggggccgaggtcgtgctggcttggcccgcctattcggagacggctgcgatcatcccaaaccctggctatgaggatggcgacatcagttgggagaagggcggcggctggtcgatcggcaccgagaacccaattaccggcctgcgctcggcccgctatggcgagacgccaggcagttcgctcatttccaataccgcgcgatacccgatcattcccggtcgcgcgatcactgcttcctgcaatgtccggcagggagcaagcgcggaagggaatgcaggcgcggcagtgcagcttgaatggcgcgggtcggatggggcgctgctcggaacctctgaaggcaatgccgtaatgtccgcgtcgaagaaccgcgtatatccatctacggtaacggccgttccgttggcaggcgccgcgctggtgaatgtggccggacgcggcatcaggaaccgcgagaacaagcccctgttcatcgacgactttgcctgggaccacgtccagaccaccggcgccaacgccgagcggacctatgccctgaccctccgggtccgtgactctggcggccggtctgtcatctggacgggaaccgtcaggattgagctgcttccggagtatccggtggtgatcggctgggatggcctattctccacagccttcgcaaccaccgcgactgctccaatcccagcaactgtcgctggcgatcgtctggtgatgatggtaagtcagaagaacaactccggcacagccagcagcattgcaacgccggcaggatggacgctgttcggcagccagaactacgccacagattcaagcggcatcccattcatgcacgtccggtggttctaccgcgactgcgatgggactgaaggcctcactgtttccctcagtgccaacaacgctggcggctgggggagcagctgctatcgaatccaggcaggatccttcagccccgcgcacgcccctgtggtggcctttgccactgccaacgccagcgacgtcagcgcgccggccttggctagcccctggggcacccgagccttgcatatctcgggttgcacggtcacctactcgcaatcgggcgaaaaggtgtacccattggccgccaaccagcgcacgaacacgaagggctccatcggcggcaacatcacagccaactgggcatgcacggcgggcattcttggggatgcgccagccacgctttggtcggcccccatcggtcaggagtcaatccgcaggaccatcgtgtccacggtgctggtgcgcaacgcatga

SEQ ID NO: 536403 - DNA, 1107 bp, Stenotrophomonas maltophilia
atggtcggtgatcgcgcggtgccggccgggtcgggactcccctcgtctaacaggggagtcagtgaattcaggaaccccgagggaaccctgacggtcggcatcgactggttctccgcttccatcgatctgcgcgcagcgctggacgaggtcgcgttccgtgatggcgacagcttcgaagaggtccgccagtggatcgagttctccccggaaaacgcacgcattgcggccctgcaggtgttctgctggttcttcgccgggcttggccttgaactggatgaagcagccggcggtggtcgcttctacacgtggcgaatcaagatcatcgacgcggccaagaagttcgtcggcatgatcgaactgggcggcgaagagtgccgccgcgccgatggcacgtataccgcccgcatcgagctaaccggtgatggatgcaaggcgataggcgcagcgcgctgcggccatgcgcagcggtggctggagcttcgagcgaagctcgaaagctgcgccggaaggataacccgtgttgacgtgtgcgccgatgacctgttgggcgaatacccattgcgtctggcgcagaagtggtacgccgctggcgagttcgataaccgtggtcagcgtccgaaggcgcagctggtggacgactacgacagcggcgatggcaagacgttctatgtgggcggcaagaagtcggaaaagcagctgcgcgtctacgagaagggcagggagcagggcgacaagagttcgccctgggtgcgctatgaggcgcagttccgcaactccaaccgcaaggagctgccactcgacattctgcgtgatccggcttcctaccttctgggtgcctacccggtcctgtcctttctgcgctgcgttgccacgcgcatcgaaatcacaaaagccgctgttgaagcgacgtggaagagcgttcgccgtcacatccgccgccagtacggcgcggccctcaatttcatcgccaagaactgccctgacgatcaggcgttgcgggcggtaatcgaatcctgcacttcgccatcgctgccgaagtgggtcacaggtgacacagcagcgcactggcccgaaatcgcggccgtacagccaacctcaaaggggtaa

SEQ ID NO: 536404 - DNA, 183 bp, Stenotrophomonas maltophilia
atgaagctcatcaccgctgtactgctgctggccacctgcctatcttttgctggatgctcgctgctgtcgggccgctccattgcgcacccctcggcggactatgccgagcgagcacagatcaccgtcaatgcagacgccgtggcaagcgcgcagccgaccgttccgcctgccacccgacgttga

SEQ ID NO: 536405 - DNA, 807 bp, Stenotrophomonas maltophilia
atgacaattaaagggggaactgtggcaaagaaccagccttacgattttaccgaacacttccgcgacttcgtgttcatgcctaagtttgacgaagctattgagaacttggcagtcctagcagagcctgaggattggaactacaagtataccgtcgcgccacatgcaaaacccatcctccgaaactatctgacatatacataccgcagagtcgcggaagagaaaaagattggcatcaccccggatgaggagtatgcgtgctttaaccttggcttaattacgccgacccaggaaccaatctacgcgttactctcaaaaaataagctggaaaagcaacctcagtactggcatttttggcgcttctgtcgtcgtggcgagcaggaccttaaccgattcgccgcattgccggaaatggctcactattacgagaatcccgccggcttggtctacgactcacggaaagagctacgagtcaatgttgagcacatcatcagtgacaacatcgagcgatttcctgatcagctaaaagcaatgaatccctttggccttcagaaccttgtcaagggtgcgattgactccgctgttgaaagggttcggcgcaactacaagacagctattccccagtactatcagggcaacatccagcttcttttaccactcacactgcttgatccagcaaaagccgaccttgctctcgtcgccgagaaatttggggacttttatcgcgctgcgacctgccttaccttggatatggcctataacaatgccagacaggtcgctaggcccgatcgcgattggctggcaccctaa

SEQ ID NO: 536406 - DNA, 729 bp, Stenotrophomonas maltophilia
atgcctacaatggacaaagacgaggcatctactttacgggcaagggcgatcgaaattcttgagcagaccttgcaagctagttatgtcgaagtaaagagcgctagtgaactcgaagcgggtatcgctgccgaggcagagtctcttactggctttctacatgacagtgattcaagaacattttgcatcttggcagcatcgttcttggaagatgtgtttcggcgctctctaatcaactattgggctatatcaagtaagtcgcaaaaagactacttcgggcctaatgggccgctatccacgttttcacaaagaatcctagtcgctgttgggcttggatggatttcgcaagaacaggctttgaacgcgacacgcctgagaaaaattagaaatgagttcgcacacaaccatttgatccacagcctcgcggatcaacgcttgtccaagctagctgagagtttgcatccatacgaacgtgtttgggtaaagattccagaatatgcgaccgctttcggtgttttgactctggagaacactctgcgcatgcgtttctattgcaataccttccatatagccgggggtgttcttgctagagcaaaactactgcaaagtgggattcctgcaaatttccgatcaggccgcggtttcgacaatctcactgagattgagcagcggtttgggaactacatgatccgtttttgcttcaccaccgcgggcgttcctttcagaggctga

SEQ ID NO: 536407 - DNA, 1452 bp, Stenotrophomonas maltophilia
atgcggttgagcgacatcgactggggtgctgacagcgccgagaacgacccgcacctgctccagtacttctatgactcgactgcattccggcgcattagcaacaggcagaagcagctcgtgatcggccgaaagggcgccggcaagagcgcgctgcgctcgcgcctcaagacgtacttcgaggagcagcccaataccttcgtcatttccgtcgcgccccagtacacgactattcgaagcatcctcaacgagggtgacctgcagcatgccttcgggcaagagatcttcttccagcacacgtggctgcggcagatcctaaccgattgtctggcagcggtcggccatgatgcaaaggggaaatacgcagcagacagcgtggcgttcgcgcgcgatgtggcgaagcagcttaaccgcacgtcactggacatgctagaaaacatcaccgagatcctgagacgcacgaaagccaaggttggcgaactcggcgagttcgggctaaaccttgaaaaagagctacgcaatatcgccgatgttgatgcgcttgagcatcatgtgctcgaactcgcagccagtggcgcgcagttcgtagtaatgttcgatgatctggatcagggctgggataactcgaccgcctcgaaccagctgctgctgggcctgctgcgtgcggcgacaattctaaatggaaagagcgccaggatctttcccgtgattttcctccgtgaggatgtctatgctctactgatgggcatcacgcaacacgcggacaagtatcgaaacatcgagttaattcgctgggaacgcgagcaactcatccaagtcctaagttcgcgcattcatttcaatcgagctgcacacgcggcagagcccgtaaatgacctattcggaagtgtttttccggaaaccgtcgctacatccaatacggttaattggttggtggagcgcacgcttaatcgaccgcgagaactgctgcagttggctcgtgcttacaccgaaagcgttgacgcgccggagccaagtgacatcgcgttgaagactgcggaaagcggctattcggcgtggaagctcacggacctatgtagcgaattctccaaccagtatccgggcttgcaggcttttttctccgcctggcgctcgcattttcctcgccaggcctatcatcttcgccgctctgatctggacgaaattgtcgtcactctcctcgccacatcgcagatcaacgagccttggttcaacgcaatcgttgaggcaactgatgtgtataagatgattggcatcctgtatgaaacgggccttattggcgactacgttgcgggcggcgccggtgggggcgcacgtgtccattactcgtttcaggaaaatcatcatcctcgcttcgacgaggtacagattcatccttgtttccgacgtgcactggataccgcagagcggatcaagaggaagagccgggcggcctag

SEQ ID NO: 536408 - DNA, 204 bp, Stenotrophomonas maltophilia
gtgtacttctatagcaaggcgttgtccctctaccgccttgtcagagagtgcctggatcatgtggatgacatctctgcatttgagtactgcaagggatatcccgactccatccagttccagctcatcggtatgacgatctcgttcttcatgatccttctgataaaccatcggatgggaacttccagcacgaaccttccaggctga

SEQ ID NO: 536409 - DNA, 411 bp, Stenotrophomonas maltophilia
atgaatgttcaacgcggctttaccctcattgagttgatgatagtcgtcgcaattcttgcaatcctagcggcgattgcattgccggcctatcagaactacaccgttaaggcacgggtttccgaggccattgttctcgcctcgtatgccaaagtcaccgtcaccgaaaatgtaaacaacaagaacgcgctggattcatctgcttgtctcggtgtcgatacgcttgcttctgggacagagaatgtcgcctcgatgagctgctcaggcaatggggtgcttacggttagaaccaccgtaaaagccggcgcgattaccttgcagcttgcaccatcctacaatcccaatgaagtggtccgctggcggtgtagcacagtcgacggggagaggaagtacatcccgccggagtgtcgctga

SEQ ID NO: 536410 - DNA, 273 bp, Stenotrophomonas maltophilia
atgtcagtggttgggccgcgaccgcatgcgatccagcacaacgaccactatgagcgggtgatcgagcgctacatgcaccgtcactacgtcaagccgggcatcacggggtgggcgcaggtgcacgggttgcgtggcgagacgccggagctgcgctcgatgaagaagcgcgtccagtacgatatcgattacatacggcgttggagtccgacgctggatgtgcggatcatcgtactgacggcgttgaaggtgctggggcagaagtcggcgtactag

SEQ ID NO: 536411 - DNA, 750 bp, Stenotrophomonas maltophilia
atgaaaagtagtgattcgctccgtctgttgcgtgagctcctcctgcacagaaacaaggactggagacaacacgatccggatcgcgatggttgcatgctggccacgtttgtgaatcccttgaccgtgcatgtcctaaatcaatcgccggagtacgcagaagtcctcggaaagtttgatctcatccagccagatggggggctgctcgcacggcacgcaactcgcgtcctgggttttccggtagcgcgtcggtcatttgatggaaattcgctggcgccggaggtcttcgcacattgcgtaaccaatgggctgcgtgttggcttcataggtggtgtggatggcgttgcctctgcggcgtcggggcgcatccaggatgcgttcggcatggatgtgaagtacacaaggtcaggattcttctcagcagcagcagaggtttcaacgtgccacgacgagatcatctccaacggggttgatgttgtagtctgcggaatgggggcgccatatcaggatcgttttcttgtcggtctgaaggaagctggctggcggggcctgggctttacctgcggcggctatcttgatcaggttgtggattccggcattgagtactacccggcgctggtcaacaggctgaaccttcgcgcgccctatcggctgatccgtgagcctcgacggctgtggcgacgatacctcctggagtacctgcctttcatgtcggcggatctgatcggtcgcctgtccagaacgcaacgatag

SEQ ID NO: 536412 - DNA, 1029 bp, Stenotrophomonas maltophilia
atgggaaggaaacccaagaagccgggggctatcccccggttccgcccccggaagcagaaatccggcgtggtgcactactactacgaccacggtggcaagccgcgcaaggaaactgcgctgggcagcgattatggcctggccatccagaagtgggccgagcttgagcgtgcggcgacgatccccgccgatgcaaagctgacgttccggcaggccgccgagcgctaccgcgtcgaggtgattccgacgaagtctgagggaacgcggcggaacaacaaccgcgagctcgattcgctgatccagttcttcgacgacccaccgggtccgctcgacgcgatccgtccgacgcacgttttcaactgcctgcagtggcgccgcagcgcgcctgtggctgcgaaccgtgaaaagtcgctgctctcccacctgtggaaccggtgccggcagaagggctacacggacctaccaaacccatgcgccggcgtgaaccgattccgagaggacggccgcgacgtgtacgtggaggacgacattctgcagcgcgtgtacgacgccgccgaccaggtgctgaaagatgcgatggaccttgcctacctcaccggtcagcggccgaccgacatgcgcgagctggaccgccgcaacatcaaggacgggacgctggtgctgcgacagggcaagaccaagacgccggtgcgcatcgcgatcaccggcgagctgaaggtgctgatcgatcgcctgctgtcgctgaagcgcccggatgacgcaccgatcagcacgcgcctgctgctgggcgaggactggcttccgatcgggaaacatgccctgcgctatcgattcgacaaagcacgcgagcgcgccggcatcccgaagaaggtattccagttccgcgacctgcgcgcgaaggcaggcacggacaaggccgattcggccggcgacattcgccaggcgcagcagcagctgggccacaagtcagtgaccacgacagagatccatgtgcggaagcgccgcggtgcgctgaccagcccggcgaagtga

SEQ ID NO: 536413 - DNA, 303 bp, Stenotrophomonas maltophilia
atggtgcctggcgaccagccgcccatgtcaatgaacgatccgaacgcatggttcgacggtggaatctatggaggcgtacctgcaatcggggccactgtgccgcgcagccagctctacatcggcgggacaattgcggctcctacgttcattggtggctatttcaatggcggccagcttcgcttgagccaggtgaacatcgatatcggggacaactacaaggtcgatccagccggcctgtataggcagaactatgccgtccctgtgttggttgcggacatggctggctacccggaatggatgtag

SEQ ID NO: 536414 - DNA, 309 bp, Stenotrophomonas maltophilia
atgccggcgggtattcagatctataacgacgccggcgcaatccagatcaccgacgaacaggcgcacctctgcctacggcgcgcaggcgtggtttccgacgccaacttcaccgtactcaaccctggcgcggactatcagacaacgaaattcgtggtcattgaccttgggcggctcactgcgccaatgctgttcctccgggctgggaatgacagtagccgctgtgctggctaccttgcccaagaggcgaacggaaactggtacgcctacattggcgtgtggtggaatttgccggtagcgcagatcaactga

SEQ ID NO: 536415 - DNA, 978 bp, Stenotrophomonas maltophilia
atgagcgccaaatcagcagcccagatcatcgaagccctttgggtgcgcctccaatcagacattgatgcgtcgcagcactttccccaagtcacgcctaagcttgcgcactacacgaacctgttcaccgccgaagcaatcttcaagggtgaagagttttggatgtcccatcccttcctaatgaacgatcgagaggaactacgatgggggattgagaacggcaccgacaggttcttcgaaagcaaagcaatatccgaggcggtggcttcggaggatcaccatcgagtcgtcatcgaggccctgcaagatgcaagggataccgacggtacgaagcattcgtatgacacttacattgcttgcttcagcgagcatgatccagaggacaaggacggtctcctttcgatgtggcgcgcctatggcgctgacggaggcggtgtagctatcgtcttcgattcgtcgaagctggcggaagacacagactcaccattgatagttgcgcccgtagagtaccggtcgaaccaacagcgcttccaatggatggattgggcgatcgcgcagacggccgacgcaatcaaggctctcgggccatcggctgatcgctctgatcttgtaatggcagtccattgttactacacccgtctacgcagggcagcgctgttctcaaagcatgagtctttccgcgaggagaaggagtggcgaatcgtctacgatccaactgccgacaaatcaggtggcaagtacgacgagatgatgagctacgcgattacagccaagggagttcagccaaaactgaagctgaggctgggcgccaaatccatcggcaaccctctgcacttggaggacatcgttgaagcgattattctaggtcctaccggaggatcgctcattgccgagcatgcgatgaggcgtttgtgcagagccgctggcaagcctaggcttgctgacaaggtctttagctcgagaaccccatacaggccgtag

SEQ ID NO: 536416 - DNA, 981 bp, Stenotrophomonas maltophilia
atgaagaatgacccaatcatcgttatctgggaaggttgcgaccccaccgtctcggaagccatccggcagtttcaagatcgctggcggccgtactccgcatcctcgcggcgctatcccatcgtgcgattgatacaggaactgatcgatcccgccgtggccgcctacatggcagcccttccagtgcgctattcgggccacgtccccggcgccggcacgggagtgagcttcagcgcgatcattcaactggtggggcttgatgcgatggttcgcttgcagcggcaattgctgcgcgcgttcgttctcacggaagatcgacagtctgcgagagatcagcgttttgtcgcaacgctggaatcactgatcgaactggtgtgggactgtgcgtgcaaacgaccagccaagtcacaggtgcgcgacacccgcctgaatggtgaacgtcagcagggcttctgccggttttgcggagcactcgccgagttgacctcgttcgccggtgggagcgatgacccaaaggctgacgaccccgaggagaaacttcgactcagcagcctgtactgcctggatcaccggcccaaattgccgaatggcgcatggaatccctcatacagacaagcaagacgctcactcgcgcagttcgatctcgaactcgccaggctcagccagcagtgcgcaaagccagctacgcctcaagtgaaatcgggcgatcaactggttgacagctacttcttccactacgtcgccggccaaacctttcagccagcagacaaagcggagttgcgcaatcaagcgcggctcatggtggactcgaagctgtcagaccgcaaaaaacaaatgctgatgctccagtggtctgggctcaaccagtcggagattgcgcgaaagctaggtatagaacgccaagccgtatcgaaggcactggcgtcgatccctgcgatgttccacttgagttcaaagtcgcgctcgcggcgtcaaccaaattga

SEQ ID NO: 536417 - DNA, 165 bp, Stenotrophomonas maltophilia; identical to SEQ ID NO: 325100

SEQ ID NO: 536418 - DNA, 288 bp, Stenotrophomonas maltophilia; identical to SEQ ID NO: 325091

SEQ ID NO: 536419 - DNA, 786 bp, Stenotrophomonas maltophilia
atgggaacggttgaggagaaggttgagttaaatggttcgcaggggcaaaagtttagggccttctgtgcatcctgtaaggccgacacgaatcatgaggcgattcaaacggtagatgtcagtggtagcgaagtcattcagtacgggccaagctataatgaccgggattctgtcgattggataaatcgctatcaggtcgtgaagtgtttaggttgcgacacattctcgttctgccaccgcaactggttctctgaggctgctgggcactatgggccagagggctacgacgatggcactactgttcgactgtacccgcagcgcgggaaggatgtgttggtagcgagggatttttacaacgttccgaggaatcttcgcggaatctacaaggaagtcatctcatgcttcaataatgactcaccgatgctctgtgcagtggggctaagggcttcgatcgagggactctgcgccgcaaatggcgtgacagacggtccagtggaagttcagaagtctgatggctcggtcgaaatcaaacgcaagcgcaatttggagggcaagataagcgggctgtccgagaagggcctgctcaccaagaagaacgcagagctactccatgagcatcggtacattggaaacgatgctgttcatgagctgtcgcgcccctcggacgccgacctcaagacagcaatcgaaatcgtggaacacatgttcgaatcactctatgaaattccagagaaggccgaggccctgaaggttgcccgcgtcaataagagaatgaccgacatgccgtga

SEQ ID NO: 536420 - DNA, 732 bp, Stenotrophomonas maltophilia
atggaaaatcacaagtttatcgatcgattctttcaaagccaacgcgagcttctagatccgtccgcgaccaatgaaagagattccaacacactttacacgttcctcaactgcctccacacgacagccgaccggctcaaggaggatttcaattgcgacataaaatgctatccagagttcaaaatactgaggctaattagaaattactttcaccacgtcggggacgttgaagaaataagattaaaggtattagcaaggaagaacgtgatggccagccactccgaacatctgataataccacttgaaaccttcgcaaaaagcgtaaaatcctttatggataagaccattcctgcccaggacgacaaaaaataccatgcaaagaagaaatatttcgaatcggaaatggcctcaatttcaaaaatgttcgcatatacagacgacttacttaataatcttgaagaaacatgcaacaagccaagcctaaagttggatggagtaaactatgaacttggattcgacatattcaagttttgctataatatatcaaacattatagccgacaaatgtcgagagctagatggaataaggcagaaaaaaatcattgcgcagctagaatcatcacgcacatcaaaaaacaatatagaaaaatacgatattctatgccatcccggccaagcccccataactacaacaaagggcttcatttacgccaacaaaattgagctgggagaatag

SEQ ID NO: 536421 - DNA, 270 bp, Stenotrophomonas maltophilia
atgaagctcattggccgcgacaagttgaaacgggagactgaatacgtcgatcgctggctccgcggctggtgtaccgaagttgcccacgcgcactggcgacgaccagaggacgtcaccgagcagttcccgagcgcactcccccgccctagtggcgacttcgtcttcccaatcggaaccagcgggcactgggtgcggctccagatcgctttcgtacaaggcgtggccctgatcctcgaaatgaacaatatcgacataccccatggacgctaa

SEQ ID NO: 536422 - DNA, 1149 bp, Stenotrophomonas maltophilia
atggcgcaccaacccgcagcaggctctgcggagagcgaccgactcgaacttctgaccgttctgatcgaggcctatgagaacagcaagtatcctatcgaggcacccgatcccgtcgacgccattctctttcgaatgcaagagaaagggctcaagcaagctgatctggtgccctattttggtacgcgcagccgcgtctccgaggtcttagggcggaagcgcccgctcacggttcaaatgatccgagcactgtcgattgggctcggcatctcggccgagacgctcgtaggactctccatttcgggagatcacacctctccaggcaaggcagacgtggattggtcgaagttccccatcaaggagatgacgcgtcgcgggtggctagcagacctgcccgcgaaagcgaaaatcggcatcgaggatttggtgaaggggttcatcgatgatgcggggcttcaattcggggcggcggcatttcgccgcagtatcggaggtgaagcagcttctccgacgactaggtatgcgctctatgcttggctcgcccgcgtgattcagcaggcgcgcgctatgaagccgaggctaggtccctttgagcccgaaaagctaacagcgggcttcctgcgtgagctcgctcagttgagctggtctgagcgcggccctcttctggctgttgagttcttggaacgtcacggtatcactgttgtgatcgagcctcacctcaggggaactcagctggatggtgctgcgctaaaggacgtggatggcacccccattatcggcttgaccctacgatacgacaggctcgacaatttctggttcacactggttcatgaagttgcacacatatggaagcacgtaggcagcgacgaggccttcttagacgacttggatgcgtcatctgaggatcggcgagaggctgaggcgaaccgactagcgcgcgaagccttcattcccagggtaatgtggcgccggagcgatgcgtatctgtcccccagtagagagacaatcgaaaagctagccagagagcttcggatacacccagccattgtcgcaggcagaatcagaaaagagtccagcaattacacggcattctccgatcttattgggcatcaacaagttaggtctttctttccgtcttcgagtgaggtgtga

SEQ ID NO: 536423 - DNA, 1131 bp, Stenotrophomonas maltophilia
gtgactccgacttatctcccgattctgaagtctttgactagcgaatacgaagcatcgaagcacatggacgcaaccgatgctgcggtcatccacccgctcttcgatgtgcccgtcataagcgagaaccggcaaaaggcgaagaagtaccagaacagcccagcgcccaagtcggactacctggacgaagtcgccgagagcattgccaaatattggaaaggcgacttggtgcttgtcgatgcattcaactgggcgcctgacgccacagttgaaaccggtgagcatgcgcttgtttaccttcattcgagcctcaaggcacagggcgttggggtggcgcctgtggtggggtacgaccgctgggatgatcaaatctaccagctcgcaatgcgtggcctcgacctgtcgggttccccatacgtatgtttccgtctcgaggccagtgcggtcgaggatgcggcagaaccggacgtcttccatgaccgaatgcaggagatgctggaggatctgcaactgagccccgccgattgcgctgcgctgcttgatcttggcgatctgtcgagtaaaccgctgatggaaattaccaacgatgcaactcgcgttctagaattgctcaacggctatgggttccgctacatcgcgaccgcagggtcttccatgcccaagtctgttgacttggcagttaagaaaaaggacagcaccgcgaaggtgattcgaaaggagatgctgctttggagagcgctccgcactgaattcaacggcattccgttggtattcggtgactacggcgtgcgcggccccggctcgaatgacgcgattcgcaaccccaacgccaatgcgaagatccgatacacgtgcgacaaggcattccttatctcacgtggccactcggttgctgaaggttgggcgattcagatgcccgctgtggcggctcagattgttaactcaaaagagtttctaccggggttcagctggggcgatcagatcatcttcgattgcagcaaccacttgcctgtgaagaatggtcatggaaaatggattgcatacgacactagccaccacttggcgtttgtagtcgaggaggtgcgggagttcgaacgctcactgatctctacccccagtggcgcgacggcatag

SEQ ID NO: 536424 - DNA, 2607 bp, Stenotrophomonas maltophilia
atgacgacggaagcagaggcgctcgccaacatccttgcgtggtctgctgatagtcccggctggcagcgcgacgcactgcgccgacttgcaacgcaagcggctctggagccggccgagatcgacgagctggcttccatctgcaagggcgacaatccggcggtcccgctggaagctgggcaccttcgcggcccgaaccgcgatcagggggaagtctatctgcggcaggtgcatggagtccggcatgtcaacgccctggctcccgaccaacggctgacactccaccgcgtcggtttgacgatcatctatggcgacaacggatcgggaaaatccggctacgcgcggattctcaagaaggtatgtcgcgcccgtatgtctggccgagccgaggaaatcgcccccgacatctatgacgctgcgccaggcacgccgagcgccactattgaatacgcgatcagcggccagaaccgcacttgcgcttggcagcttggtcaggctgccgacaacgcgctttcaggcatcagcgtgttcgattcccgtaccgcgaacgtccacgtggacgatacgaatgacgtggcttacacgccgtttccgctcaagctgctaggtgcgctggcgcagctctgcaagtcggtcaaggataagctggcagccgagatcgcgcagataaaggcgcaaacgcccgaagcgatcaggaccccggcatgcagccgggacacagcggtcggcaagctcatggcccgaatcaccgccaacactgcgccggcgacggtcgaagcgttggcagcgctcacgcaagcagagcaagaccgattggcgcagctcacggcggacctggcaggtgatccggctcgcgcggcgcgtcagcttgcggcgatgaaggccaaggttgacgggcacattgcgcgcctggatcggctatttgcttcaatcagcgacgattccgccaataacctgcgccgccttgccgttgatagcgatgccgcacgccgggcggcagaagctgcttccagtgcgcttttccgcgacgaaccgttgccgcagattgggtcggaggtttggcaggcgctatgggccagtgcccgagcattttctgacgcggaagcctatcccgaacggcgattccccgtcacagaccccggcagcgtatgcgtgctttgccagcaggaattgacgcccgtcgccgctgatcggctcaatcgcttcgaggcttttgtgcgcgacgacagccagcaacgtgccgacgctgcgcgcgtcgcatacgacagggcgctggcaacgttcaagggtgaggctgtttcgttggccgagctggcgaacattgtggcaaccgtccgcgacgaactgcgccaggatgccttggcgatggagatcaggggcgcgacccttcgcgccctgtggcgtcatcgccagatcaggcgacgccacgcaaatccaagcgccgctattgacgtgcccgttacggaatattcgcgtcaggcactggtcgatcaagcagcgggcatcgagactcgggcgaacgcccttgccgcggaggctggctctccagctcgcgccgccttgcttaccgaaaaggccgagcttgtggatcggcaatggcttggtggcatcaaagccgatgttctcgccgaaatcgaacgacagaagaaaatcgcactgcttgagacggcccagcgggacactgctaccaaccgcgtcaccaccaagagcaccgagatcgctcaggctttggtgacggacgcgctacgcgcgcaatttgctcgcgaggtggcgagcttcgagattgctggcctcgctgtggagcttcgacagcaaaacagcgttcagggcatccctcgcttcaaggtcgcacttacacggaagcccacggctgcggtgggacaggttttgagcgagggcgagcatcgctgtgttgccttggccgcgttcatggccgaactcgccaccaccgaaaacaagtctggcatcgtctttgacgatcccgtttcctcgctcgaccacatgcaccgggaggccgtagctaaacgcctggttgctgaggccgctcatcgccaggtcatcgtcttcacccatgatcttgcgtttctgttcgagctgaaccgcgcggctgacgatgcgcagccaaagccgccggttgcgattagctccatcagccgaggtgctgacaaggcaggcttctgccgcagcgagccgccattcaaagcgcgtcgggtcagtgacatcaccacaagtctgagcaatcagcttgccggtgaacgctaccatttcgagcaaggcaatcaagacgagtggcgaaagtccgtcaaatccatcgccgcgacgttgcgcgatacgtgggagatcgcggttgaagaagctgtcgggcacgtcatccggcggctgtccaacgaagtgaagacgcctggcttggtcaagctgaccgcgatcacggttcccgactgcgaggccatgcgtgacggctttggccgctgttccgagctgctgcacagcgccgccgctgcgttgaaccgcccgctgccgaggccagagacactgacagcggagattgataccttggcggcctgggcggacagccttcggcagcgtcagggcgctgcgaggttgccctga

SEQ ID NO: 536425 - DNA, 234 bp, Stenotrophomonas maltophilia
atgacgaagactcatcaggaagaacaggctgagccgttcttcatcaccgaggaagtcgaggccgaattgatcgcggccggctacgaattcgaaccgcctggccacgcgaggaccgcaagcatctccgagctgttcggctggcggcctggtgagacgctgtcggaagccgtgagcaggcgcttggcgagcactggcacagctagcgagtgcgaaccgcgaggcaaaggtctatga

SEQ ID NO: 536426 - DNA, 201 bp, Stenotrophomonas maltophilia; identical to SEQ ID NO: 325082

SEQ ID NO: 536427 - DNA, 2781 bp, Stenotrophomonas maltophilia; identical to SEQ ID NO: 325083

SEQ ID NO: 536428 - DNA, 201 bp, Stenotrophomonas maltophilia; identical to SEQ ID NO: 325084

SEQ ID NO: 536429 - DNA, 339 bp, Stenotrophomonas maltophilia; identical to SEQ ID NO: 325085

SEQ ID NO: 536430 - DNA, 1197 bp, Stenotrophomonas maltophilia
atgaaagcactgcacaaggcggcgctgatcggcgtcgcgctcgcgctctactccacagccgcgtcggcccagctcaccaaccaggggatgcttgaccaagtggtaacggagttcgccacgcgggccacggcctggcagacggtggtgatgaatgccgcgacgttcttgttctggacgctgggcacgatctcgctggtcatcaccttcggcttcatggcgctgcgcaaggctgacattggtgagttcttcgccgagttcatcaggttcatcctgttcttcggcttcttcctctggttgctgcgcaatgggccgaactttgccaactcgatcatccagtcgctgtccaggattggcgagcaggcttccggtatctcctcgatcacgccgtcgggcatcgtcgatgtgggcttcctgatctggaagcaggccatcaacaacctgtcggcctggtcgcccatcgacagctttgtgggcgtggtcttgagcgccggcatcctgcttctgctggctgtcatcgccgtgaacatgttgctgctgctcgtgtcagcctggctgctgtcctatgccggcatcttcttcctcggcttcggcggatcgcgttggacttccgacatggcgatcaactactacaagaccgtgctgggcgtcgccgtgcagatcatgacgatggtgctgcttgttggcatcgggaatgatctgctgtccagcttctacgccaagatgagcaagggcacactgaacttcgaggagctgggcgtgatgctggtgttctgcctggcgttgctgctgctggtcaatcgcgtgccgccgctggtcgccggcgtgatttccggtacgggcgttgggaacgtcggtggcatcggcaacttcggtgcgggcgctgctgttggtgccgcgatgggggctgccagtgttgcggccggcgctgcaagcatggccggcgctgccgtgatgagtggcgcggccaacctcgccggcggggcttcggccgtcaaagccgccttcgagaaggcccaaggcagcgcgaccggcgatgccggcgcgggcatggacatgatggcgagcgtggggggcgcgggtgcttcgggcggtcaggactcagccggcgcagggggatcgcccttcgcgcaggctgcgggcttcgggggctcgtcgtcgggtggcggcagcagctcggccggctcgaagggggggtga

SEQ ID NO: 536431 - DNA, 276 bp, Stenotrophomonas maltophilia; identical to SEQ ID NO: 325088

SEQ ID NO: 536432 - DNA, 381 bp, Stenotrophomonas maltophilia; identical to SEQ ID NO: 157168

SEQ ID NO: 536433 - DNA, 192 bp, Stenotrophomonas maltophilia
atgaagcaagtaaaggagaacgcatattcacggtcagatgcgtcggcccaagagttcaccgagatcttgggctcagtcagagtgcacccagctctgaatagagagctaagggagtgggcgattggtagaggggtgagggtcacgacgcttctgcggcgcatcatgattcgatacctcgacttagatgcttag

SEQ ID NO: 536434 - DNA, 924 bp, Stenotrophomonas maltophilia
atggatgtttcgctcccgttgccgtctatgctaattgcaatgatcgcaatatggattgcatataaaaactacctgagaaagggtggattggatatcaggggtgcgtatagcgtgactgctagtgtcgagtctagcgaaaaatacataagtgaaattctgattgaaaatgctaaggatcggtcggtaacaatttttgcaatatatctacagattggacgctcgcattatcttcagttgattgactttgaatcatcgcctcttattctaagggcattcgagtcattcaaaaaggaatttgggccagttgagtgctattcgaataatctttctcggtatcgcgttaatcgtatgctggccgataaaaaagtcaaaaagcgtcttgtttgttcgacatcaagtggtagatacgtcgttcctcgcgtcataccaaaatggacgccatttgttgcatcgctttccaacgcgcttgtaagaggaatttatccctcgcgtacagagtttgaagggagggcggtgggtgatcagatcgattacgtcgtcaagtttacctccgaaggcggtgaaaatcctcgtgtggttcttttgcagaaaagctcgtatagatatcagatatttgagggcgttcagcttactccggagtcgctcatgacgagcgatgctctttcattgtttcttgaggaggagaggagaaatggtgctttcggtgatttaaggttcgaaattgcggatgttggtgcatggagaagtttcaagcattcgcagttcgggctcttcgatcgagacgctatagaattgcgccagccatctatgtgggagttctatgtgctcggaactttctatgctcgctggaggaagctgaaagcaagaaaggcgttcgcaaaaaaacaagtttccgtccccagtggggattcggcaggcgcttga

SEQ ID NO: 536435 - DNA, 807 bp, Stenotrophomonas maltophilia
atgaagttcgcgaagatcagggatcaagagccggcgactgatgaagaaatggcagccctcagtgcttgtactgaggacgctcagaagctcgtcgaaatcacttggaagctgctttcgaaactaaactaccagcagaccgttcgtagctacacagcgctgcccctgttgctctgtgcgctggaccgagcatgggcattctacgagctcgccgcaaagccacgagggtatcaaggtgccgtagcgctgtttcgcccgttggtagagacatttctgaggggggcgtttcttgccgggcccgccgaggacgatgaagttctctacttccgagcaaatgacaagttgaagaagcgatttccagtgcggccaacgcctgataacccgggaaagaagcagccaggcgccaaggaacttgtcgaagtagttgtggactcgtttggccccgagttgggcgaacgtctaaggcaggcagtgcaaagcgattgggacgattggcatggcgtcgtccatggtggaaggctgattgtcgccatgtatcgcgggggaccagatgagaacggtcaagtcggcgctgcgccgatgcagcagcgcccgccagtcctcggaatcatcagcttcatcacgcatgtcgcatgctttgtctccctcattcccttggctgcagggcgtttggtggaccatacgacagacgaagaaactctcggcatcgtcgctgctgggcgcatcgctagtgatgccttcttcaagaaatggggacggcccgaccggtcaaccagcggcgccgcttacaccgcactgggcgaggagtag

SEQ ID NO: 536436 - DNA, 816 bp, Stenotrophomonas maltophilia
gtgaccggtgaccagcaggaccgtcacggaagggtggcgtgccatggcgtgcttggcgagatcgtgcccgttcatccccggcaggcccacgtcggagatgaggagatcgaaggcgggttgctgcgccaagcgctccacagccgcttcagcgtctccgaccgcagtgatgtcatagccgctgtctttgagaacgtcctgcatcgattcgcggatggcgacgtcgtgctctacaagaaggatgcgagggtacgagaggcagtcatagcaaacctggttgatcaaaaattcgaggaatcatgcaggactgggagtaaagcgctggtgcatccctgtgatgacggcaatcacgggaaggcgagggcgccgtcgcgccttgacgcggttttgccgcgagggctggatactcaatccccacccctcccgcctggacactcccactactgtctcttatacacatctgacgctgccgacgatatgcagtgtgtacagccccacgcccttcgcgtcgaaatcatgccgctggagtgcggtgataccgcggtgatcgtcgaatttgaatccgaaccgcccgcgtcgtggcgagctcttctgacgaagaagttggcagacgtggaggggcttgagctggtatccgcccagtttgaggggcgggttctctacgtgctgggtgcggaggggggtaggggaggaagcgtccacagggtgagtcaattgttgcggtctcttcccggacgtcctgggggctcaaacctgctggatgagcctgtgagccggggcgtcccggggccggagcaggctctagcgacgcacgcctga

SEQ ID NO: 536437 - DNA, 810 bp, Stenotrophomonas maltophilia
atgctcacgttgcagcagcgtccacggctggtactcggccgggctccagtcgggcagttcactggcgccgccggcaagttgtcccagcaactgctgccaatggcgcagtgccgccggatcggcgttgtcgacttcgatcgcgtcgaacagcggatgcgcgccgtgctggcgcagccaagtgtccagctggtggccgaatccgcagaagtggccatagctgcggtcgcccagcgcgagcacgccgtagtgcaggtgctgcagcgaaggcggcgcggccatcaccccgcgcaggaacggcagggcatgatcgggtgggtcgccttcgccagtggtgctggcgatgaacaatgcacgctggctaccggccagcaaggtggcgtcgacctcatgcaggcctcgcacgcgcaccggcacgccggcaccacgcaatgcctcggcactgcgttcggccagttcgcgggcgaagcccgtctggctggaccagaccagcaggatcggtgcgacgtcggcagaggcagcatcgtcgcgcggtcgcccacgccaccacagtgcggcacaggccagcgcatacaacgcggtggcgatgatcgcgacctgcgtttgccgtgcaggtggcgcgccctgccaccaggcttcgctgaggtgcaggcgcaacagcgcccaagcgatcagcgccagcaggatcagtacaagcgcgttgccgagcagcgcgcgcgacggccgtgcgctcatgcgtcctgctcgtcgagcaggcgctggaaggcgctgctgagaaattcgtgcgggccatccgctgcgcgatgcaggtag

SEQ ID NO: 536438 - DNA, 888 bp, Stenotrophomonas maltophilia
atgaactcgcgcagcccccttaccgtcgccctgatccaggagcgcaaccacggtgatgccgccgccaacctggcggtgatcgaagcacgcgtggccgaggcggctgcgcagggtgccaagctggtgctgctgcaggaactgcacaacggcccgtatttctgccagcacgaatcggtggacgaattcgacctggccgagccgattccgggcccgagcaccgagcgcctgggcgcactggcgaagaagcatggcgtggtgctggtcggctcgctgttcgagcgccgcgctgccggcctgtaccacaacaccgccgtggtgttcgagaaggacggtaccctgctcggcaagtaccgcaagatgcatatcccggatgatccgggcttctacgagaagttctacttcaccccgggcgacatcggcttcaagccgatcgatacctcggtgggccgccttggcgtgctggtgtgctgggaccagtggtacccggaagcggcgcgcctgatggcgctggccggcgccgaacttctgctgtacccgaccgcgatcggctgggacccggacgatgtgcaggacgagaaaacccgccagcgcgacgcctgggtgctgagccaccgtggccacgccgtggccaacggcctgccggtgctgagctgcaaccgcgtcggccacgaggcgtcgccgctgggcgcgtcgggcatccagttctggggcaacagccacgtgctcggcccgcagggcgagttcctggccgaagccggcaccgatgccacggttctgctgtgcgatgtcgacctgcagcgcagcgagcacgtgcgccgcatctggccgttcctgcgcgaccgtcgcatcgacgcgtacggtgacctgctcaagcgctacatcgactga

SEQ ID NO: 536439 - DNA, 399 bp, Stenotrophomonas maltophilia
atgaacaccaagaccattgccatcgccatcgccctgatcgccggcaccgcggttgtttcgtcggtgcaggcctccgaatccatcaagaccctggccaccgtggaagtgcgccccagcgctgaccagctggccgagcgcaacggctacgtcgccgccccggtcgccgccgcgatgccgatcaccaccctggcctcggtggaagtgcgcccgagcctggaacagcgcgtcgccctggccgccgaactggaagcccagcgctacgccgccaccctggccgccgccgccaccaacgtcgccaactcggtcatcgtcaacctgccggccctgcaggtgcgcccgagcgctgccgacctgcaggcgctggccaccgaaaccgcccaggtcctgctgcgcccgtaa

SEQ ID NO: 536440 - DNA, 951 bp, Stenotrophomonas maltophilia
atgagggccttcagttacgaacgcgcgaaatccccggccgaggccgccaaggctgtcgccggtaccgagggcgcgaagttcctggccggagggaccaacctgctcgatctgatgaagcttgaggtcgagacgccagcgcacctggtcgatgtgcaggacatcggcctggacagcatcgaaaccaccgacgagggcggcctgcgcatcggcacgctggtcaccaataccgcgctggcctcgcatgagcgcgtgcgccgcgagtacacggtgctgacccgcgcgatcgtggcaggcgcctccgggcagctgcgcaacaaagccaccaccggcggcaacctgctgcagcgcacgcgctgcccgtatttctacgatccccatctgccctgcaacaagcgcctgcccgggtcaggctgcggcgcactcgagggtttctcccggcagatgggcgtgatcggcacctcggacagctgcatcgcgacgtatccgggcgacatggcggtggccctgcgggtgctggacgcctcgatccagaccgtcagcggtgacggcagtacgcgcagcatcccgattgccgatttccatcgttcccccggcgacaggccgcagcaggacaacgtgctgcagcgcggtgagctgatcacccacgtcacgctgccgaagcctctgggcggtcggcacgtgtaccacaaggtacgtgaccgcgcgtcctatgcgttcgcactggtgtcggtcgccgcggtcgtgcagcgagacggctcggcgcggttcgccttcggtggggttgcgccgaagccgtggcgcgtcgaggcagccgaaccgctgctgcgcgacggcgtaaaggccgcggtccggcaggtgttcgccggtgcccgtccgacgcgggagaatgcgttcaagatcgcgctcgccgagcgcaccctcgcagccgtgctggcggaaggagagcgctga

SEQ ID NO: 536441 - DNA, 225 bp, Stenotrophomonas maltophilia
atgagtgcggtggggcattgtggcgacaatgccgcctgcgaggggttctttggtctgctcaaacgcgagcggatctatcgcacaacgtatccaacactcaatgccgcccggtccgatgtgttcgaatacatcgagcgccgccacaaccccaggatgcgacggcgacgggtcaagcaggaccagaagttttcagccctttccaaacagtccgtgatttcggggtag

SEQ ID NO: 536442 - DNA, 609 bp, Stenotrophomonas maltophilia
atgaagcgtttcatcctcactctcaccatcgccgcgttgctggctccggggctttcgtttgcccaggacagcacccggcccgaaccccaaaagaccaacaagctgcgcctgttcaaggccggcgggattggctgcgctgccggtgcaggcatcgccctgctgaccggcaagaaagacaaggccctgacggtgtgcgctgctggggcgattgtcggaggcattgcgtcctatcaagcccagctcaaggagttccgcgaactggaagccgaagccaaggcagctggcctggatgctcaggtgcataccaagaccgtcgaaaccaaggacggccaggccgaagccctggacaagctggtcatccgttacccggccgctgacatgcagccggtgagtgccaagaccggcgccacgctggacaagctggccgcgttgctcaaggcgagcaaagaaaagctgacggtcagcttcagcggtgccgatgccgccgtgtgccaggtgccggtcgttgagctggcaaagcgcggcgcgcttcagaacgccacggtcgatgaccagtgcggccggggcgattacgccatcacggtttcgccgatccccgacgttcgctaa

SEQ ID NO: 536443 - DNA, 627 bp, Stenotrophomonas maltophilia
atgccgcggacactcccgcaaccggaaccaccccgccttcgacagttttccgcgatctgtcggagcacggggtcggatcccattgctgcgcaacgggctctgaccccaatctggaattcgagatctgacagatgtgtcgaccaaggtcgacacctaccaacaaccgcgcgttccaacggtcgctgttacccacagccgcgtgaacctgtcagaggtggggcggtatgggcttgcaggaccgttggcgccatggattgcgccatcgagcccccaggggtgagggcgctttgcttgcgaagcactgcttcgcgagcaaccgtacgcccagccgccagcggctgggccggaccgcggagcggggtttacggcgtgtgctgcaagcccacaccgccccgtcaacccagggaatgctcgctgttgttgttgccggccagcggccggcactaccgcgggtgcagggccgcaggccctgccgaaccccttcactccgcgacgtgctcgacctgccgcggctcgggcttggtgtcgggcagctgccagaagatcatcgtcgaggtcagggtgatcgcgccgacgcacaggaatgtcgcgtgcagtgctgcggtggcgctgttgctgtccaggtga

SEQ ID NO: 536444 - DNA, 960 bp, Stenotrophomonas maltophilia
atgaacgatatcgaccagaccgcgctggaaatcgcacgagcattcgtcccggtggacgtggttggccagcagcgcgccaacctgcaggtggccatcatcgaggccatcaagaagcacgcgaacccgaagaccctggcggacgcgcagtccggtgggagggtgaggctgggggatcaggccgagcgcgcgcggttcgaggcgtggcactgcgagaagttcaagactcgctgtctcacgggcgctccgacgcgcgacatgcacaacggcgtctatgcggacaactacggcccagccgaggaacaggcgcgctgggaagcatggcaagcagccctctccgcccagccctctccgggtggtcaggatgcgcacgaactgtgggcggcggcgcagctttcgcccggcgaagggattgaggatggggtgcgacgaattgaaggcgccctcgccgcccgccagccggtggcatcaaaccaggtactcgaaaacgtcgagcaactgggcgttgatagtgacagccagtcctccggaaattcgggagaactgcccgttgatagccagccggtgggggagccggtggactgggcgaacgtagcgaacgaatatgccgatgctgcctgcaatgctctcgacggcatgaagtgcattcgcgacgggctgctgaacgtggatcaggtgatcgagagtcagcaggcgaacatcgaccgaatccagaaacttcaccaccgtgacaccaccccgcccgcgcaggccgtggacctggctcctctcgtctccgagcttgcggaagctgatcgtgagtacgcagaggcaaagaagaagtaccacaccgtcagcgccaagatgagcgcggcgggcggacgggcatcttgcagggcagcgtatgaccgcgaagtcacggcgaagacccggttggatgcagccgtgcgcgccctgatcgacagccaggcggtgggcaaatga

SEQ ID NO: 536445 - DNA, 543 bp, Stenotrophomonas maltophilia
atgttgaacatcaacgaagaagaactgaaagccgcgatcgtctcgcaagccgcagaccagatcgtcagaaacgatgaagacttgtccggcatggttgcgaaggaagtggcccagcgcatcaacgccatctttgtcgatcgcgtcgaagcgcagatccaggcagcgatcgatgccgcagtgaacaacgcgttcgatgaagagtaccagcgcgttacgcagtggggtcagcccgatggcccgtcgaccactgtccgcaagcagctggagaagatcgtcaacggctactgggccgccaaggtggatgccaagactggcaagccctccagcagcgactacaacagtgtcacccgcgccgaatacctgatgaccacgatctgcgccgaggacttcagcgccgcgatgaagcagagcgcactcaacgtgaccggcgccctgaaagacggcctgcgtaaccagatcggacagcagatggacgtgatcctcaacgagcttttccgggtcaagagcctgcaggaccagggcaaggtcgaaaagccctactga

SEQ ID NO: 536446 - DNA, 204 bp, Stenotrophomonas maltophilia
atgactacgaactacgaccaagcccgcgaagagcgcatccagatgctcgttgccctcatgcgagtggcaatggttgccggggagaaggaagaggccagccgcctccattccgagttcaaggcggcagtgcttgcccgctcttctgagcagaacgaccgtatgcgccgcgctgtcgaaacccgcgtcttcggagcgccgcaatga

SEQ ID NO: 536447 - DNA, 711 bp, Stenotrophomonas maltophilia
atgagcaccatgatcatgtcgctctgctggccggtgcagatgccaccgacgcccaagtcggtgctgatctcgctggccgacaatgccaacgaccagggtgttgcttggccgtcgctgacgaagatctgtgagcgaacctgttttggtaggacggcggttattgcggccattcgctggctggaggatgagggcttggtcgtggcggaccggagcaatggtcggcacacgtcctacgcgatcgatctgaatgcggtaaaccagttcgcctcccgtaccagtccgcctgccgaaccggtccgtctcccgaactcaaaccagtccgcctcgcgaaccaaccagtccgcctcgcgaaccatacccgtccgcgaggcggactctaaccgtcataaaccatcaagaaccgtcagaagcaaccgtcatagcgcggccgtggaggaagccatcaagttgcttccggatctgcctgctgacctggtgaccgacttcgtggcgatccggaaggcgaagaagcttcccttgaccgggacagcggtcgccggtttgcaacgtgaggccgacaaggcgcggttgacgctggagtctgcggtgcgcctgtgctgtgagcgcggatgggcggcgctgcgcgccgactggctggctcgggaagccgggcagggcatgccctcgcaatcccagccaagtcccggctctgccacgcgggagctgctgtga

SEQ ID NO: 536448 - DNA, 1422 bp, Stenotrophomonas maltophilia
atggccgccatgcacgaacacagccgtcggtcccgtggcctgccgatggcggtggagtcggagcagtacgtcatcggcggttgcatgaactaccccgaggccattggccgtgcaggtctggagccgggggacttctaccgccgcgaccacgccctcctgtggtcggagatgctgaagctggaggcggtcggcaagccttgcgatgcgactttcctggccgaatggatgacgtctcagggacatggcgagcggatcgatgccggctacgcgatggagctgcagatcaacggctactcggttgccggggtgccggcccatgccgccctgatccggcagcaggccgccatgcgacgtgcgatcgacatcggtgattcgctcattgctcgctgcctggatccggagggtgaagagtcggtggcgatcctggacgcggcgattcgagacctcatgcagctgaccaagacgcggcaagggcacgagcacacgctggagcaggcgttgacggcggcctggcgcgatgcggaggacgcctatgcccaccgaggccagatccgtggcgtgccgtacgggttcactcggcccgacaagcgccttggcggagcgcacggcggcgacctgatcttcattggcgcccggccgtcgatgggcaagacggcgcttctggtgaactgcgcgttccatcagggcggcctgggcatccccgtgggcatcatttccggcgaacagtccgcccgccagctggcctcgcgcggaatcgcaggtgagtcaggcgtcgccgctgagaagctgcggagcggtgacttcaccgaggaagagtggccgcagctcaatgagggtatgcgcaagctgattggccgccatgtcttcatttacgaccgcagcgcgcccacgctggacgaagtggtcaggacgatccgtcgctggaagcaggagcacggaatccgcatcgcatggatcgactatctgcagcgaattcgcgtaccgcgctcgaaagatcgcgccgaagaagtcggagaggtggcgcgcacgctgaagacgcttgcccgcgatctggatatccccatcgtggtgctggctcaggtgaaggccgaggttgaccgccgccccggcgacaagcggcccggcttgggtgacatcgcaaacagcgacgaagccactcgcgaggccgacatcatcgcgttcctgtaccgacactgcgtctacgaccgtgagaacggagaccccgcgaaggcggagttgaacgttgagaagaaccgtcacgggccgtgcggtcggttcgaactgggctttgatgggaagaccatgcgtttcctcgacccggaaatgcagcccgatcacttcgaccagccggctgtcccgcgtcgcgcgcgatccattcctgtcggcaagaccgctgccgcggcaagggcgggcgacgcatga

SEQ ID NO: 536449 - DNA, 225 bp, Stenotrophomonas maltophilia
atggctaacaagctgctttcgctccaaatcaaaggcctccacaagtcatggagcttcgaattcatgggcgacccgaagcacatcccggaatgggaggcagacggccttgaggtctgggaggtctgcaacatcgtcccgctgtgggtggcacgcctcggcctgacccgcgcctggtgcttcgtgcaggacgttttcaacttcaagaatccatggggtaaggcatga

SEQ ID NO: 536450 - DNA, 585 bp, Stenotrophomonas maltophilia
atgaacgccatcgagaagcgatcacgggagctgtatgaggcggccagggggttctacaacgccaccatcggcgaccccgaggtcaccatccgatgcaagtcaggggaggcacgggacgtggtcacggctgcggcaaaccgctgtttcctggcactgctcgatcagcgaaccagtctcgtcgcggccgacaaccttcaggttgttgcggcgcccgcacatggggcacatgaagtgcagcccgaagctgtcgatgttgggctcgacctggccgaacccggcgaacgcctcttggcagcggatgcactggagcatggggccggtgtacgcccggaaggtgacggccaggctacagccaaccatgttgcgcacaacctcaaaatggttgccgctcacccagaccattccgagcattccctcgatatggtgaatcccatgtcggtccccgatggtttcgtgcgggtgccggcggagctggtcaaggcggtcgaagatctctcactgatctacgaggctggcggcgacatcgacagcaagctttcagagatcgaagcaatgctcggcgctctcccggaggtgaagccgtga

SEQ ID NO: 536451 - DNA, 231 bp, Stenotrophomonas maltophilia
gtgagcggtgcaggcttcgttcctcaccggcagtgcatggtggccagcggcgagtgcttcatgcagggccgctgccttcagaagtgcaacccatccaccctgcatggcctgagcgcagagcagctgctgatcatggccgcgcaggcgcagcgaaaggccgtgggccagtcttcgcgcatcgccgccgtgatcgaccagatggtgaccgacctgcgtcggggtggccgatga

SEQ ID NO: 536452 - DNA, 600 bp, Stenotrophomonas maltophilia
atgcgaaatgaagatgaactgatcgctgagctgcgactctggggcaatgcccacgtgaaccgcttcgcgctaagccgtgccgaccggagctatcacgtcctggacaaggcgcgggacctagcgcccggcaccactgaaaacgcgatgcgtgatcttgtgggccgggacggctcagagcgccgcagcttcatggcagagcggagtggggtgcctggcatgggcatgctcccggcttgggctgttgatcccgttcgctcgacaaacgatgccgatcaccctcacgacaaccctgagatagccgtcgacctgggaatccccgatgagctgcggtggatcgacagagcagttgcagccatgcacaggcatagcccgctgagggcgatcatcctgcgggtcgagttcaccagcgcggtgagcaggggcatcaaggcccgtatggcttgcgagcagttcgagaaggaaatggcccgtaggttggggatcgagcctattgaggcccaggacgacgagccgcccgccctgtctgttcggcagtaccgacacgaactggccagagcgctggacctgctccggggaatgaggtgggcgattgccgcttga

SEQ ID NO: 536453 - DNA, 312 bp, Stenotrophomonas maltophilia
atggaagcccagccgagccacgacggcagcacgcggatctcgttcggaccgttcgcgaaggtgatcttcacggctttcacgagcctggtcgcggccggaggcgtgtggctggtcagttccatgcaggcggtgctgacccagcagcaggtcaccaaccagcagatgaccacggtccagcagcagctccagaccatcaacacccagctggccgacgtcccggcgctgaagctggagctggctaagcaggccgtgcaggtcgagcagaacaagcaggacatccgcgagctgaagcagctcagggggttgaagtga

SEQ ID NO: 536454 - DNA, 453 bp, Stenotrophomonas maltophilia
gtgaacgacaagaccatcgagcaggaaatccaggccaagggtctgactgcgccgcgcgtgacgccggctgacatcgaggccgagatcgtcggcgagtacttcttcaccgctgccgacggatacaacgccgcaccgtgcttcgatccgacgggccagcccggcgaagcattgccgccgccgccgtcactgggcctgctgacgttctgcgtgctgcagctgcgcaatggcttcaccgtcaccggtgagtcggcctgcgccagcccggagaacttcgacgccgagatcggccgcaagatcgcgcgccagaacgccgtccagaagatctggccgctgctgggcttccggctgcgcgatgatctggcgcgctcggtgctcaccgatgccgattcgcaggctgacctggccggcaccccgcggccggatcatccgagtcgctgtcatgctgatccctga

SEQ ID NO: 536455 - DNA, 378 bp, Stenotrophomonas maltophilia
gtgaacgtcgatcgattcaacccgcgcgtgtggctgcgcaactggctgctgaagccgacgacagcggaagcctcgctcggtcaggaactgccgaaccgcctgaccctgacggcagagcgctttgcggtggtgaacacacatgcgcaggcgaagccagtcgctcagccgttcgggtgtgcggatggacaggcgtcattggatctggcgcttgccgagaagatcgaaaaggcggccgccgcctgggctcaacgcgagtcacgcccaggtggcgtgctacatggccgtggtcctgatgcgtcgtggacgctcaggaaggacggcaacttcaagatccaaggcatggggccgagcgaggggccgaccaatgagcctgtctga

SEQ ID NO: 536456 - DNA, 225 bp, Stenotrophomonas maltophilia; identical to SEQ ID NO: 536441

SEQ ID NO: 536457 - DNA, 282 bp, Stenotrophomonas maltophilia
atgggcaacagcaagcagtacacggatgagttccgtgccgaagcggtgaagcaggtgatcgagcgtggcttcacggtcgtggatgtcgcctcccggatcgggattcccaagcacacgttgtatggctgggtgcaggcggccaagaagacggtaccggcccctggagccacggttgcgccgagcgactcggccgagatccgacggctcaaggccgagctgcggcgggtgaccgaggagcgcgacatcctaaaaaaagccgccgcgtactttgccaaggggtaa

SEQ ID NO: 536458 - DNA, 663 bp, Stenotrophomonas maltophilia
ttgtcgtatccctatccgctggtcgtgttcgaccttgatggcacgctggtcgacagcgcagctgatatcgccgaagcactgaaccgcacgctggaagacatcggcatggcacgcgtgccggaagccaccgtgctcggctggatcggcgacggtgtgcgccgcctggtcgaacaggccgtgcacgccgccggtcgtgaggtcgacctggccgaggtgatgccggtcttcatggtgcactaccgcgagtgcctgctgcgcagcccgcgcttgttcgatggcgtggccgacgcactggcgcagctgcgcgcacgcgacgtgccactggcgatctgcaccaacaagcccgaagcactggtgccgcctctgctgcagcacctgggcattggtgatgcgttcgcgctggtactggggggcgattcgctgccgcagcgcaagcccagtggcgaaccgctgcggcacatcgctgcgcatttcgcgctgccggtggacgcctgcctgatggtgggagattcgttgaccgactaccgcgctgccgaagaggccggcatgccgatcgcgctggtgcgctacggctacccgcgcggcctggatctggccagcgcgcatgcggtggcagtgatcgacgacctgcgtgagttgccagggttggccgcaggccggtaa

SEQ ID NO: 536459 - DNA, 792 bp, Stenotrophomonas maltophilia
atgaaccatggacaggccttgatcgaccacaaccgtgctgcctgggaccgccaggccagcgaagtgcgcgaatggtcgcgcccggtggagagttcaacgattgccgccgcgcgcgaagggcgttggcaggtgcacctgacgccccgcgccctgccgctggactggctgggcgatgtgcgcggccgccgggtgctgtgcctggcctcgggcggtggccagcaggcaccggtgctggcggcggccggggccgacgtcaccgtgttcgacctgtccgacgggcagctggaacaggaccgcagcgtggcggcgcgcgacggcctgcggctgcgcacggtgcagggcgacatgcgcgacctgcacgcatttgccaacgacagcttcgatgtggtgttccaccccatctccaatctgtacgtgccggacgtgcgcccggtctggaccgaatgccgccgcgtgctcgcgcgcgatggcatgttgatggccagcttctacaacccggtgctgttcgtcggcgcgcgcgatccgcagctcgatgcgcagggcctgatccggccgcagtacgccattccctattcggacctggaagacctgcccgccgcagaacgtgaggcgaaactcgcccgcggcgatgcgctgacttttggccacagcctgaccgaactgatcggcggccagctggatgcggggttcgtcattgatcgcttcatggaggactggcagccgcagccgcgcttcctgatcgaccgctacctgcccacgttcctggccacccgcgcgcgccggatcggctga

SEQ ID NO: 536460 - DNA, 930 bp, Stenotrophomonas maltophilia
atggaccgattgaccgccatgaccgtgttcgtcgaagtggccgagcgtggcagcctgaccgcggccgccgaggtgctggacatgtcgcgggcgatggtcagtcgctacctggccgaggtcgaggcctggctgggcgcgcgcctgctgcaccggaccacgcgccgggtcagcctgaccggcccgggcgaggcggcgctggcgcgcttccgccggatgctggcgatcggcgaggaactgcagggcgagctggccagcgacgatcccgagccacacggcacgctgcgggtcaccgccagcgtgtcgttcgggcagagccacctggcacgggccgttgccggctttgttgcgcgccatcctgccgcgcgcatcgagctgctgctggtcgaccgcatggtgaacctggtggaggagcgggtggacctggcggtgcgcatcgcgcgccagatcgaccccagcctgatcgcgcggcggttggccacctgccgctcggtgctgtgcgcaacgccgtcgtacctggaggcacgcggcacgcccaccgcccccgagcacctggccgcgcacaattgcctgacccaccattacgtcggcaagagtctgtggcagctgcaccgcgatggccgttcgctgtcggtggcggtgggcggcaacatcagtgccaacgaggcctcgctgctgctggaggcggtgcgggccggtgccggcatcgccatgctgccgacctaccaggtggcaccgttgctgcgcagcggtgaactgatcgaactgctgcctgcgttcagtctggacgaactcggtattcatgccgtgtacgcatcacgccgccagcagcccgctatcatgcggcgattcctggactacctggccgagtgcttcgccagcccggccttccaggatctggattggcgcccaccgggcaaggagaacacatga

SEQ ID NO: 536461 - DNA, 639 bp, Stenotrophomonas maltophilia
atgaagatcgccctcgttggttccaccggcaacatcggccgccagatcgcccgccacgcgctggcccgcggccacgaacttaccgtcatcgtgcgcagcgcacaggaccttccggctgaactggccggtgcccacccggtgatcgcctcgctggatgaccaggacgccttggtcgccgccatcaccggccacgacgtgctggccagtgcctacggcccgcgtccgggcgatgacatcggccgcgtcggcgaggtcgccgcgcagctggccgccgccgcacgcaaggccggcgtgacgcgcctggtggtggtcggtggtgccggcagcctggaagtcgcgcccggcgtgcagctggtcgatacccccaccttcccggaggcctacaagccgtacgcgctggcccaccgtgaggcattcaaccgcctgcaggcggtggacgacctggactggaccttcttctccccggccgccgaaatcggcccgggcgaagagcgcggccagtaccgcgtgcagcccaaggccttcctcgccgatgccagcggccacagccgcatcagctacgccgactacggtgcagcgttcgtcgccgagctggaagcgcacgcgtatccgaagcagatcatcaccgcggcgtattga

SEQ ID NO: 536462 - DNA, 912 bp, Stenotrophomonas maltophilia
atgcgtaccgctgccctgctgctccccctcgccctggccgccagcttcaccagtgcaccgctgctcgccgcaccggccaccccggcgccggcggcggcgacgaaagcccagctgcacctgcagaccttccatcccggcccgcaggcgatgttctcggtctcctcggtgctgatcgaaggccgccacgacgcgatcctggtcaatgcgcagtttggtgccagtgacgcacgcaagctggtcgagctgatccgcgccagcggcaagcagctgaccacgatctacatcagccacggcgatccggattactacttcggcctggccaccgtgcaggacgcgttcccgcaggcacgcatcgtcgccaccgcgcagacggttgcgcatatccggcaaacccaggccggcaagctggcctactggggaccgaagatgggtgccgacgtgcccgcgcgcatcgtggtgccgcaggtgctggacggtgatgccctgcagctggaaggccagcgcctgccgctgatcggcctggatggcccgaccccggaccgcacggtgctgtgggtgccgtcgctgcgcgcgatcgtcggtggcattccagtggtcgccggcgagcacgtatggatggctgacacgcagaccccgaagtcacatgccgactggctgcagaccctgcagcggctgcaggcgctgaagccgaaggtggtggttccggggcattacgcgccgggtgcggcgctggatgccagtgcactgcgcttcactgcggactacatccgcgcattcgacgccgagacggtaaaggccaaggacagtgcggcgctggtgaaggcgatgcaggcgcgctatccgacgctggacggcgtggcgtcgctggagctgagtgcgaaggtggccaagggcgagatgcagtggccatga

SEQ ID NO: 536463 - DNA, 1095 bp, Stenotrophomonas maltophilia
atgacccgactgcgcaagatcatccacgttgacatggacgcgttctacgcgtcggtggagcagcgcgacgatccgtcactgcgcggcaagccggtggttgtggcatggcgcggcgcgcgttcggtggtgtgtgcggcctcgtacgaggcacgcgtgttcggcgtgcgttcggcgatgcccgcggtgcgcgccgagcgcctgtgcccggacgcgattttcgtacccccggacttcgcgcgttacaaggcggtgtcacagcaggtgcgcgagatcttcctgcgccataccgacctggtcgagccgttgtcgctggacgaggcctacctggacgtgaccgagccgaagagcggcatcgaactggccaccgacatcgcccgtaccatccgcacccagatccgcgaggaaaccaggctgactgcttcagccgggatcgcgccgaacaagttcctggccaagatcgcgtcggactggcgcaagccggatggccagttcgtgattccaccgcagcgggtggacgcgttcctgctgccactgccggtgaaccgggtgcccggcgtcggcaaggtgatggaaggcaagctggccgcgcgcggcatcgtcacctgcggcgacctgcggcaatgggcattgaccgatctggaagaggcgttcggcagtttcgggcgcagcctgtacaaccgggcgcgcggcatcgacgagcggccggtggagccggaccagcaggtgcagtcgatttcctcggaggacaccttcgccgaagacctgctgctggaagacctgaccgaggcaatcgtgcagttggcggagaagacctggaaggccacccgcaagaccgagcgtgtcggccataccgtggtgctgaagctgaagaccgcgcagttccgcatcctcacccgcagcttcaccccggaacgcccgccggaatcgatggaagaactgcgcgacatcgcgctggccctgcgcgcccgcgtcgacctgccggcggagacgcgctatcggctggtcggggtcgggctgggcggcttccgcgaaaaggaggcggtggtgcagggcgagttgttcgagcacggaccgaacgagtccacatccctctga

SEQ ID NO: 536464 - DNA, 516 bp, Stenotrophomonas maltophilia
atgacccgtctccacgcgttcaaccgcgaacagctgctggccagcgcacgcggtgaactgttcggcaccgctgccggccgtttgcccaacgatccgatgctgatgttcgaccgcatcaccgatatccacgaggacggcggaccgcacggcaagggcatggtacgcgccgagctggatatccgcccggacctgtggttcttcggctgccacttcatcggcgacccggtgatgcccggctgcctgggcctggatgccatgtggcagctgaccggcttcttcctgacctggctgggggcccccggcaagggccgcgcactgggctgcggcgaggtaaagttcaccggccaggtactgccggacgccaagctcgtgcgctacgagatcgacatcagccgggtcatcaaccgcaagctggtgatggcccagtcggacgcccgcatgtacgtggatgatcgcgaaatctacagcgcgcgcgacctgcgcgtcggcctgttcactgaaaccgggagcttctga

SEQ ID NO: 536465 - DNA, 1209 bp, Stenotrophomonas maltophilia
atgcgtcgcgttgtcatcaccggcatgggcatcacgtcctgcctcggcaatgatctggataccgtttcgaccgcgctgcgtgaagggcgctcgggcatcaccctgctggccgaccatgccgatgccgggctgcgcagccaggttggcggccgtgtcgacctcgacctggacgcattgatcgaccgcaagcagaagcgcttcatgagcgatgcggcggccttcgcctacctgtccatgcgcgatgccatcgccgacgccgggctcagccccgagcaggtcagccacctgcgtaccggcctgatcgccggttccggtggcggctccagcgagtggcagatcggcgccgtcgacctgctgcgcgaacggggcgtgcgcaaggtcggcccgtacatggtgccgcgcacgatgtgctcgacggtctcggcctgcctggccacggcctaccagatcaagggcgtcagctactcgctgtcggccgcctgcgcgacctccgcgcactgcatcggcgcggccgcggacatgatccgccacggtgcgcaggacatcatgttcgccggtggtggcgaagacctgcactggtccatgagcgtgatgttcgacgcgatgggcgcgctgtcgaccagcttcaacgacactccggccagcgcctcgcgcccgtacgacaaggatcgcgacggcttcgtcatcgccggtggcggcggcatgctggtgctggaggactacgaccacgccgtcgcacgcggcgcgcgcatccatgccgagctgatcggctatggcgtgacctccgatggcgccgacatggtggcgccctccggtgaaggcgcggtgcgctgcatgaagatggcactgcagagcgtcgaccgcccgctggattacctcaacacccacggcacctcgaccccgctcggcgatgtcaccgagctcaacgcgatccgcgaagtattcggcgacgcggtgccgccgctgtcctcgaccaaggcactgtccggccattcactgggtgcggccagcgtgcacgaggcgatctactgcctgctgatgatgcgcgacggcttcgtggccggttcggccaacatcgccgaactggacccgaaggtggcggatttcccgatcctgcgcgagagccgcgcgcagaagctggacacggtgatgtccaacagcttcggcttcggtggcaccaacgcggcgctggtgttcggtcgggtgtga

SEQ ID NO: 536466 - DNA, 684 bp, Stenotrophomonas maltophilia
atgacccccatcgctgcgctgccgtttcttcccgacgccgtcatcttcgacatggacggcctgatgatcgacagcgagcgtgtctcgctggcctgctggggccaggccgccgatgaattcgggctgggcctggacgaggcagtgttcctgcgcatggtcggcctcggcgaccgcgattcgcacgcgctgctgcgcgcgcagggcatcgaggacagcgtgatcgatgcggtggccgcacgttgccacgacctgtatgaagcacgtacgcagaccgggttgccgttgcgtccgggcatcctggagctgctggagctgctgaaggcacatgcgatcccgcgtgcggtggccaccaccacgcggcagccgcgggccggccgcaagctggccgctgccggcctgctgccgtatttcgatgcggtgatcaccagtggcgacgtggcgcggccgaagccggcgccggacatctacctgctggccgcgcagcggctgggccaggcgcccgaacgttgcctggcgctggaagattcaccggccggcacgcgcgctgcactggcggcgggaatgaccgtgatccaggtgccggacctggtgcacccggatgaagatctgcgcgcactgggccaccgcatcgtcggttcgctggtggatgcgcgcgcgctgctgctgccgttgctgccgaaataa

SEQ ID NO: 536467 - DNA, 702 bp, Stenotrophomonas maltophilia
gtgaagctggtcaagcacatcgccaacctgggctatggcagccgcaagcaggtgcagtggctgttccgcgaaggccgcatcaccgacgccgacggcgaggtgttgtacgccgacgaccaggtgccgcatgaggccatccgggtcgatggcgagccgctggatccgccggtgggcctgtcgatcgcgctgcacaagccggccggctacacctgctcgaccaaggacaccggtcgcctgatctacgacctgctgccgccgcgcttccgcgaccgcgacccggtgctgtccacggtgggccgcctcgaccgcgagaccagtggcctgctgctgctgaccgatgatggtggcctgctgcaccggatcatctcgccgaaatcgaagctgcccaaggtctacgaggtcgagttgagcgacgacctgcgcggtgatgaagtggcgctgttcgccagcggcgcgctgatgctggagtccgagaagacgcccctgctgccggctgaactcgaagtgctggatgcgcgtcgcgcgcgcctggtgctgcacgaaggtcgttaccatcaggtacgccgcatgttcgccgccaccggcaaccacgtgcaggccctgcaccgcagccgcgtcggcgggctggacctgcaggggctggacgaagggcaatggcggcagctcacccctaccgacctggatacgctgttcgctccatga

SEQ ID NO: 536468 - DNA, 1065 bp, Stenotrophomonas maltophilia
atggcctccagcgacgacgcccccctgcagaccctgctcctgccgttctcccaaggcgccctgcgctggccggagggcccggtggccttcctgcgtgcccgcgacggctggccgctgcgcgaagtggccggccaccgcgtgctgcactgcgaacagagctttgccccgttcgcgcagccgctgcagcaggccgccggctggaccgtcagtggccagctggaggatggggccggcaagggccgctacccgctggtgctggtgctgccgccgcgccagcgcgaagaagcccgtgcgctgttcgcccgcgcgctggcgctggttgcagaagggggccgcatcgtcgcctgccagtccaacaacgaaggtgcacgctccggcgagggtgacctcaagcagctgaccggcctcggcggcagcctgaccaagaaccattgccgcgtgtactggaccgccctgatgcagggccagcacgatgccgacctggccaagcgctggtcggcgctggatgcggtgcgcccgatcgtcggtggccgcttcctcagccgcccaggggtgttcgcctgggatcgcatcgatccggcgtcggcgctgctggccgagcacctgccgcccgacctggccggccgcgccgccgacctgggcgccggctacggctatctgtcgcgcgaactgctggaacgctgcccgaagatcaccgcgctggacctatacgaagccgagcagcgcgcgttggcactggccgagctgaacctggcgccgccgccgcgcgcgctgccgctgcgcttcctgtggcaggacgtcaccgccggcatcgagccgggctacgacgtcatcatcagcaatccgccgttccatacgccctcgcgtgccgaccgcccggacatcggccagcgcttcatcgccgtggccgcgcaggcgctgcgcccgggtgggcgcctgtacgtggtggccaaccgccacctgccgtacgagcacaccctcaacgacagtttcggtgcggtgcgcgtggtcgccgagcgcgacgggttcaagctggtcgaagcggtgaaggggaagggcaagtga

SEQ ID NO: 536469 - DNA, 264 bp, Stenotrophomonas maltophilia
atgcgagccttgttcgtcggtggcgtggtcgacaacagtgaaatggacctggaaggcagccatccgcccgtgcattaccccgaagacaccggcggcggccactcgcgctaccggctgcaccaggtcggccatggggccgacggcagcgtggcctatgcggtgtatggcgcgccggacctggccgatgacgaggtagcccgggtggcggaagaacgcgcctacgcgcgccggttcgaagcgacgccgaccttgttcgagcactga

SEQ ID NO: 536470 - DNA, 291 bp, Stenotrophomonas maltophilia
atgtcccgcatagctccccgtatccatactgatccggcgcagatcgcgcgcctggaagccctgctgccgcagctcgacggcgagacgcaggtggaactgatcctgcaggacggccgtcgcctgctcggcaccgtcgcggtgaggccgacggtgcagcagtatcgcaacgaagccggcgatgaaggcagcaacggacagttgcgcctggatgactacgacacgccggtgcagcagcaccatgtgtggctggacgagattgccagcatccgcaggttgccgccgagggtctga

SEQ ID NO: 536471 - DNA, 1989 bp, Stenotrophomonas maltophilia
atgatggtgccggcgcccgaacccgacctgcatcatggcgtgcttgaacgcatcaacgccggtttctgcgtgatccaggtgctgttcgagggcgaccgtgcggtcgactatcgcttcatcgaggtcaacgacgcgttcgaacgccatacgggcctgaaggacgcgcgtggccagcgcatgactgcgctggaacccaaccatgagcaggactggttccgcatctatggcgaggtcgcccgcagcggccgccccgcccagttcgagatggaagcgcgtgcgctgggtcgttcgttcgcggtcgacgcggtgcgcgtgggccggccgggcgaggacaaggtcggcatcctgttcttcgacatcaccgcgcgcaagcagatggaagtggagctgggcgagagcgaagcgcgcttcagcgcgctggccgacggcctgccgatgccggtgtgggtgctcgatgagcgtgggcacgcccgtttcgtcaacagcgctttcagcgagttcttcggcggcgacgagacgcgcgttccggaagacgtctggcgtggcctggtgcatccggacgacgcctcggtgttcgaatacgaactccaggaggcgttgaaggcgcagcgctcgatgcacgcgctggtgcgtgcgcggcgtgccgatggccaatggcgctggctggagatgaacgcccgcccgcgcttctcgcgcatgggccgcttcatcggcctggccggcagcagcccggacgtgaccgaacgccgcgagatcgaactggcccgcgaggagctgttgcagtccgagcgggccgcacgcagtgccgcggaaaacatggcgcggctgaaggatgagttcctggccacgctgtcgcatgaactgcgtacgccgctgaccaccattcttggctggagcgaactgctgctgcagcgcgtggacgacaccagtccgctgtacaagggtctgaacgtgatcgccaacagcgctggcgcgcagaaggggctgatctcggacatgctcgacctcagcagcatgctgctgggcaaggtgcagctggaggtggaagtgctggacctgcgcaccctgcttggcgaagccattggtgcgcaggaactggtcgccgaaggcaaggcactggacgtgcacctgcagctgcccgagcagcccagcctggtgctgggtgatgccacgcgcctgcagcaggtgttctggaacctgctctccaacgccatcaagttcaccccggccgaaggccgcatcgacctgcagctgcaggccgacggcaatcactgggtgatcaccgtgcgtgacaccggcgacggcatcgcgcctgaattcctcaatcatctgttcagccgcttccgccaggccgacggcaccaccacgcgccgccacggcgggctggggctgggcctggcgatcgtgcagcagctggtggaactgcacggcggcacggtcacggcggccagcgaagggcatggcctcggtgccacgttcaccgtgcgcctgccgcagcaccttcccgatgccgagcggcggccactgcgcgaagtcatcagcgggccgatcctggagccggtgatcgtcgaaccgtatccgctgcgcggcatgcacgtgctggcggtggaagaccagccggaagtgctggaatacctgcgccgcatgctggaagagcagggcgccagcgtgtccgcggccagctcggccggcgaggcgttggcgctgctggccgacaccggccatctgcagtaccacgtgctgctgaccgacatcggcatgccgggcatggatggctatggcctggtgcgcacgctgcgcgaggacatgggcgtggatgcggcgaccttgcctgcggtggcggtgactgcactggcgcgtgccgacgaccgccgccgcgcgctggcatcgggcttccaggagcatgtggccaagccgtactcggtagcgcagctggtggctgccgtgcgcaaggtgcaggtgccacgcgcggacaacgcgctgcactga

SEQ ID NO: 536472 - DNA, 567 bp, Stenotrophomonas maltophilia
atgaaccgctcattggccactgccctgctgctggcaggcgccctcatggccggcagcgcgaacgccgcgccgcgcgccgtcaccgatccggacgcgccccgtgcgctgcaggccaacggcccggtcagcgtgaaatgggacgatccggccacattcaccgagatccgccagagcaccaaccgcttcgaagccgaacgcggcaactgggtgcagcagctggccagctacgtgcaggccactgcagccaagccgctgcagcctgggcagaccctggacgtgaccctggtcgacatcaagcgcgccggcgactacgagccctggcacggcccgcggggcagcgacatccggatcatgcgcgacatctatccgccgcggatcaccctgcagtacacgctgaaggacgccagcggccgcatcgtcgatgagggcgaagccaagctcagcgacaccggctacctgcacaacctcgggctgaagagcgacagcgatccgctgcgctacgagaagcgcctgatcgacgactgggtgaagcgcgagctgagcacgcgggctaccgctgcacgatga

SEQ ID NO: 536473 - DNA, 1071 bp, Stenotrophomonas maltophilia
atgcgtcctgcccgcgcgctgatcgatctgggcgccctgcgcagcaactaccggtttgcccgtgaactgggcggtggcaaggccctggcgatcatcaaggcggatgcctatgggcatggcgcagtgcgctgtgcgcaggcgctggaaggcgaggccgatggcttcggcgtggccaccatcgaagaagcgctggagctgcgccaggccggcatccgagcaccgatcctgctgctggaaggcatcttcgagcccagcgacatggcgctggtggctgaacacgatttctggttcgccgtcggttcgccgtggcaggtggaggcgctggccgccttcgccagcccgcgcccgctgacggtgtggctgaagctggacagcggcatgcatcgcctgggcctggacgtggacagcttccgcgccgcgcatgcacgcctgtcgacgctgccgcaggtcgaacgcatcgtgttgatgacccacctggcgcgcgccgacgagctggacagcgagcgcacccatgaacaggccgcgaccttcgcccgcgccatcgatggcctgcctggcgagaccagcgtatgcaattcgccggcgttgctgggctggccggatgtacgcagcgactgggtgcgcccgggcctgatgctgtacggcgccaacccgctgccggacgacaccgcgttgaccgagcgcctgcgcccggtgatgacgatgcagtcgaaggtgattgccgaacgctggatcgaggctggcgagccggtggggtatggcgcgcgcttcgtggcgaaggcgcgcacccgcgtgggcgtggtcgcgctcggctatgccgacgggtatccgcagttcgccccgaatggcaccccggtgctgatcgacggccagcccggtgcgctgatcgggcgcgtgtcgatggacatgctgacggtggacctgactgcgcacgcgcaggccggcgtcggcagcgtggtggaactgtggggcgctgcgccgacgctgtcggaactggcgccgcgctgtggcgtgagtgcctaccagctgccgtgcgcggtcaagcgtgtggcacgggtgtaccaggagtga

SEQ ID NO: 536474 - DNA, 1305 bp, Stenotrophomonas maltophilia
atgcgagtcctagttctcggcagcggcgtgatcggcaccaccagtgcctggtacctgcgacaggccgggtttgaagtcacggtgatcgaccgccagcccggcccggcgctggagaccagcttcgccaatgccggccagctgtcgttcggctacacctcgccctgggcggcccccggcgtgccgaagaaggcgatcggctggctgttcgagaagcacgcgccgctggcgatcaagccgggcatggacctggcccagtaccgctggctgtggcagatgctgcgcaactgcacgcatgagcgctatgcgatcaacaaggcgcgcatggtgcgcatgtccgaatacagccgcgactgcctgaacgagctgcgcgcgcagatcggcatcgaattcgaaggccgcgacctgggtaccacccagctgttccgtacccagcagcagctggacgcgtcggcgcaggacatcgagatcctggcccagtacggcgtgccgtacgaggtgctggaccgcgccggcatcatccaggccgaaccggccctggcccatgtcgacggcctggtcggcgcactgcgcctgccacgtgaccagaccggcgactgccagctgttcacccgccgcctggcgcagatgtgcgtggatgccggcgtcgaattccgcttcgaccaggacatcaccggcctggagtttgagggcgaccgcatcaccggcgtgcgcatcgacggcaagcgggaaaccgccgaccgcttcgtggtcgcgctcggcagctactcgccggcactggttgcaccgctgggcatgcgcctgccggtctacccgctgaagggctattcgctgaccctgccgatcaccgacccggcgatggcgccgacctcgaccatcctcgacgagagttacaaggtggcggtgacccgcttcgacgaccgcatccgcgtcggcggcatggccgaagtggccggtttcgacctgtcgctgtcgcagcgccgccgtgaaaccctggagctggtggtcagcgacctctacccgaagggcggtgacctgtcgcgcgcgcagttctggaccggcctgcgcccggccacgccggatggcacgccggtgatcggcgccacgccgttccgcaatctctacctcaacaccggccacggcacgctgggctggaccatggcctgtggctcgggccgctacctggccgacctgatgagcgcgcgccagccgcagatcagcaccgaaggtctggatattttccgctacggccagtacggtcacgcgccgcaacacgagaaccgcacatgcgtcctgcccgcgcgctga

SEQ ID NO: 536475 - DNA, 480 bp, Stenotrophomonas maltophilia
atggccccccggacccgcgaactggacaagatcgaccgcaagatcctgcgcatcctgcaggccgagggccgcatttccttcaccgaactgggtgaacgggtcggcctgtcgaccaccccgtgcaccgaccgcgtgcgccggctcgagcgcgaaggggtgatcaccggctaccacgcccatctcgacccggcggcagtgaaggccagcctgctggtgttcgtggagatcagcctggcctacaagtccggggacatcttcgaggagttccggcgcgcggcgctgaagcttcccaacgtgctggagtgccacctggtgtcgggtgacttcgattacctgctgaaggcgcggatcagcgagatggcctcctaccgcaagctgctgggcagcacgttgctgacgctgccgcatgtacgggaatcgaagagctacatcgtgatggaagaagtgaaagagacgctgagcctgccgattccggattga

SEQ ID NO: 536476 - DNA, 153 bp, Stenotrophomonas maltophilia
atgaaaaaccagcagaaccgtcatcccggcaaggaaccgcagggccgcaacccgcagcagcaacagcagcagcaacagcagatggagccgcagcagcacaagggcggcaagccgcaggaacagcgctcgcagaagcatccgcagcagcgttga

SEQ ID NO: 536477 - DNA, 375 bp, Stenotrophomonas maltophilia
atgaaaccgacccttcccctgctgttgatcgccctgatgccggcactggcgcaggcccaggtgcccacggccgacccgaccgccacccgcagcgcgacccgcgtggccccgccgccggtggcacccccgccacaagcggcccggccgcagccgcaggtgctgccgtcgccgcagcccacgcagccgatcaagtcgaccggtccggcccaggtcgcgcccgccccggcgccgaagccggccgacaaggtctatgaccgcaacggccgcatcgtgcccggggtccgccccgcgggcccgaaccgcgtgttcgattcgcgcaccggtcgttattacgacagcgtgccggccggcgatggccagcagatcaagcgctga

SEQ ID NO: 536478 - DNA, 468 bp, Stenotrophomonas maltophilia
atgactgccttcgacctgacgccccctactgccacccagaccgaggcgctggtcgccggcctcagcagcgaagagcgccgcgtgctgctgcagcacggtaccgaggcgcccttctgcggcgtgttcctcgacaacaagcgcgagggcgtctactgctgccggctgtgtgcgctgccgctgttccgctccagcaccaagttcgattccggcaccggctggcccagcttcttcgccccgttcgacccggcgcacgtgcgcgagatccgcgataccagccatggcatggtgcgcaccgagatcacctgcgcccgctgcggcagccacctgggccacgtgttcccggacggtccgccgcccacctacgagcgccactgcctgaactccgtctcactttcgttcgtcggcacgggcgagccctggcccgatccgctgcagcgtggcggtgccgaagccggtgtggcgggctga

SEQ ID NO: 536479 - DNA, 855 bp, Stenotrophomonas maltophilia
atgctcatcatcgttggattcctggtcgtcatcatcagcgtgatcgggggctacctcggtgcccacggccgcctgggtgccctctggcagccctacgagctggtcatcatcggcggcgccgcactgggcgcgttcctggtcggcaccccggccaagacggtcaagcagaccctgcaggccatggtcggcgtgttcaagggcccgcgctacaagcagcaggactacatcgatgtcctcagcctgctttatgaactgctcaacaaggcccgccgcgaaggcttcatggccctggaagaccatgtcgagcggccggccgagagcgccctgttcgccaactaccccaaggtgcaggccgaccaccacctgatcgacttcatcaccgactgcctgcgcctgatgatcggcagcaacatcgagccgcacgagctcgagccgctgctggagctggaactggagaagcaccacgccgaggccatggcaccgtcgcaggtgctgaccaaggtcgccgacggactgcccggtttcggcatcgtcgcggcggtgctgggcatcgtcatcaccatgggctcgatcggcggcgacatcgtcgaggtcggtggccacgtggccggtgcactggtcggcaccttcctcggcatcctgctcggctacggcttcgtcggcccgatggccgccgccatggaggcacgcgccgagcaggacagccgcatctacgaatcggtcaagactgccctgctggcctgcctgcgcggttacaacccgaagatcgcgctggaattcgcccgcaagacgctgccgtcgaacgtgcgcccggccttctccgatttcgagcagcacctgaagacggtcaagtaa

SEQ ID NO: 536480 - DNA, 939 bp, Stenotrophomonas maltophilia
atggccgagaacaagcccaccgtcatcgtccgccgggtcaagaaagccggccacgccgctcaccacggcgggtcgtggaaggtggcctatgccgacttcgtgaccgcgatgatggccttcttcctggtgctgtggctgatggccaccaccaacaagaacgaccgtgcggccatttccgagtacttccgcaaccccagcccgctgagcgggcagaacgccacgccggcgcccggcatggccggtccgggcggcgccagcacctcgatgatcaagctgggcggtgccaccgacatctcgcgcggcagcagcaacgatcccttccagaaccagaaggaagcggtgccgcagccggtggaccagcagcagcgcgacaagcagcagctggaagcgctgatgaaggaactgcaggaagcgatcagcaagagccaggcactggaaccgttcaaggaccagctgctgctggacctgaccccggaaggcctgcgcatccagatcgtggacaagcagaaccggccgatgttcgacctcggcagcgctacgctgaagccgtacacgcaacagatcctgcacgagctggccaactacctgaaccacgtgccgaaccggatcagcctgaccggccacaccgacatcaccgcctattcggccgcacgcggctacggcaactgggaactgagcgccgaccgcgccaacgctgcacgccgtgcactggtggacggcggcctggaggacagcaagatcacccgcgtggtcggcctgtcctcgtcagtgctgttcgacaaggccgacccgcagaacccgatcaaccgccgtatcagcatcgtggtgatgacccaggccgccgaagcgaccgcgctggccggcgccgggccgcaggtcgggctgtcggcgccgaccgccgacccggacgtgcaggccgcgcagggtgaagcaaagtag

SEQ ID NO: 536481 - DNA, 495 bp, Stenotrophomonas maltophilia
atgtcccagaactccaaggccaagcgcgacaagcgcaagaagcagcagggcaagcgcccgttcctccgcctgaacgcccagcagcaggtgcagaaccatgccgtgctgaccaacgaagacggccaggtggtggcggccatcggcctgcagggccgtgagtggctgctggccatcggcggccagaccatgggcaatgccgagaacccggtgccgatgctggccatgctcaagcacctggccaacgtgcaggaaaaggaaggccgcaaggtcaacctggaatattccgaactgctgaagtcgctgctggacaccctggccgccgaatccgatcagaccgctgacgagtacctggacaagctggtcgccgagttcgagaccgtggaagccgaagaaggcgaagaagccgctgcggctgccgaaggcgacgtggttgaagctgctgccgacgccgaggccgccccggccgctgacagcgacagcaagccgcaggtctga

SEQ ID NO: 536482 - DNA, 276 bp, Stenotrophomonas maltophilia
gtgacggtctacgtcgatgacgcggtgcatccctggcgcggacagcgctgggcgcacctgatggccgacaccctggccgagctgcacgccatggcggcgcagctcggcattccaccgcgggccttccagaacaaggccagcggtgcccattacgatgtcactgccgagctgcgcgcacaggcgatcgcgctcggcgcgcaagcgatttcgcggcatgccgaccgcgaactggtcaaagcggtgatcgccaacgcccgggcgcagtaccggccgtag

SEQ ID NO: 536483 - DNA, 543 bp, Stenotrophomonas maltophilia
atgcccgacaacagcgactatttcgacttcgaggaagacatccacgacttcgacgaggagggcttcgaggcgcgggtctggaacctgctggtgctgatcaacccgggcgacgaagagctggccctgcagcagttcaaccgctggcgcgagcacctgtccgaggacgggcagccgctggaagcggacagcgactggctgccggcgctgttcaccgccattgcctggcagtccggtttcgatgtggagcgggatgacctggaatcgctgcagtcggcggtcaacgagctgtcggcacgcttcaacctgcagctggactggggcggggacctggacgacgaggacttcgccgagggcctggacggcgtgcagctgatgtccaccgccttcgaccgcctgcgcgagcacaactacacgctgtggagcgtggatgccggcagtgacggcttcaccggggtgatggcgctgacccgcgacgacgacgcgatgctggcgctgtgctcgctgctgaacgtggaaatccggctgggcagtgacccgttctga

SEQ ID NO: 536484 - DNA, 294 bp, Stenotrophomonas maltophilia
gtgccgctgaagccggccttggtggccgtcactgtgaatgaagcgatgagcgatacccctcccgaccacctggccatcaacccggccagccccttccatgatgcgcaggcgctggagcgcggcgtcggcgtgcgtttcaacgacgtcgagcgcgacaacgtcgaggaatactcggtcagcgaaggctggatccgcgtgcaggccggcaaggcccgcgaccgccgtggcaacccgatgaccatcaaggtcaagggcaaggtcgaggtgtatttcctggaccagaagccggagtaa

SEQ ID NO: 536485 - DNA, 1650 bp, Stenotrophomonas maltophilia
atgcataccatcgaagtcgtcctggcgatgctggtggccgttgtcgccagcggctacctggttcgcgtcctcccgttctcgctgccgctgccgttggtgcagatcggcctgggcgcggtgatcgccggcgtgttcaaccgcggccacgcgctggagccggaagtgttcttcctgctgttcctgccgccgctgctgttcctggatggctggcgcattcccaagcagggcctgttccgcgacaagggggcgatccttgaactggcgttcggcctggtggtgttcaccgtgatcggtgccggcctgctgatccactggatgatcccggtgatgccgctggcggtgtgcttcgcgctggcggccatcgtctcgccgaccgacccggtggcggtgggcgcgattgcttcgaaggcaccgattcccaagcgcctgatgcacatcctggaaggcgaatcgctgctcaacgatgcctccggcctggtctgcttccgcttcgcggtggcggcggtgatgaccggttccttctcgctggccacggcctcgctgaccttcctgtgggtggcggtggccggcctggccgtgggcgtggcggttaccctcggcgtgtccacgttccagcgctggttgtggcgccgcttcggcgaggaaccgggtgcggcgatgctggtcaacctgctgattccgttcgcggcctacctgctggccgaagaaatccatgcctcgggcatcctcgccgcggtcgccgcgggcatcgcgatgagctacgtcgagctgaccggccgtgtctccggcagcatgcgcgtgcagcgcgcgggtgtctggaacatgctgcagttcagcttcaacggcatcatgttcgtgctgctgggcgagcagttgccgggcatcgtcgagcgcgccaccaccaccatgaacgagtccggccaccagagtgcatggtggctgctggtctacgtggtggtgatcaacctggcgctgatcctgctgcgcctgctgtgggtatggctgtcgctgcgctggaacctgctgcgtgcgcgccgtcgtggcctggagcggggcgaggcgccgaactggcgcatcgtggtggcgacctcggtggccggcgtgcgcggcgcgatcaccctggccggtgtgttgaccctgccactgttcctgcccgatggcagcgcgttcccggcgcgcgacctggtgatcttcctggccgcggcggtgatcctgttctcgctggtcggcgccagcgtggcgctgccgcagctgctgaagggcctgcagctgccggccgattcgggcgagcgcaaggaagaggacctggcacgccggctgtcgtccaaggccgcgctggccggggtcgagcgcatgcgccagcagctggtgatgaaccagaacaccgagaacgtgcagctgtacaacgacgctgcctcgcgggtgagcctgctgtaccagcggcacctggagaaggacaacgacggccccgatgtggacccggagaaggtgcggcgcatggagctgggttaccgccagctgcgcagcgccggcctcaatgccgagcgcgaggaactgttccgtttgacccggcgcggggtgatctccgatgagatctcgcggcgcctgatccgcaacctggacctgctggaatcgcgcaagcgcgaatga

SEQ ID NO: 536486 - DNA, 789 bp, Stenotrophomonas maltophilia
atgtcccgcctgccttcgctgtacatctcccacggttcgccgatgaccgccctgcatccgggccaggtcggcgtgcgcctggccgagctggcgcgcgacctgccgacgccgcgtgccatcgtgatggcctcggcgcactggctgggccggcagccgctggtcggtgcgcacccgcagccgccgacgatccacgacttcggcggcttcccgcgcgcgctgtttgaactgcagtacccggcgcccggcgatccggcgctggccgaagaggtggccggccgcatcgccgccgccgggctgccggtggcgctcgacccgcagcgtggcctcgaccacggtgcctgggtgccgctgcggctgctgcgcccgcaggccgacatcccggtggtgccggtatcgatccagccgctgctcggccccgagcatcagttcgcgctgggccgcgcgctggcgccgctgcgcgaacagggcgtgctgctggtcggttcgggcagcatcacccacaacctgcacgactggggcgattaccaggacggcaaggaagcaccgtatgtgcggcccttcatcgagtgggtggagcagcggctggccgccgatgaccgccaggcgctgttcgattaccgccggcaggccccgttcgccgagcgtgcgcacccgaccgacgagcacctgctgccgctgttcttcgcgatgggtgcggccggcgagggcggtttcggtgcgcgccgcatcgacgccggcatcgatgccggtttcctggccatggatctgtaccgcttcgacggggcatga

SEQ ID NO: 536487 - DNA, 411 bp, Stenotrophomonas maltophilia
atgcacaccacgaccgctcctgtctcgtcgctggccccgtacggtgccaccctgctgcgcctggccctgggcgtgctgttcctggtccacgccctgaccaagctgctggtgttcaccccggccggtactgccgcgttcttcgaatcgctgggcctgcctggggtactcggctatctcaccctcggcgtcgaactggtgatcagcgccgcgctgctgctgggcatctacgcgcgctgggcgggcctgatcggcgtgccgctgctgctgggcaccatcgtcaccgtgcacggcgccaacggcttcggcttcgccaatgccggcggcggctgggaatacccggcgttctgggcgctggcgctggtggtgctgttcctgatcggcgatggcaagtggaccctgcgttcgcgctga

SEQ ID NO: 536488 - DNA, 882 bp, Stenotrophomonas maltophilia
atggacactctcgaggcgatgcgcgtgttcgtggcggtggtcgaacgcaatggcttcagcgccgccgctcaggccctggacctgtccaccgccggcgtcacccgccaggtcgctgcactggaaaaacgcctgtccacccgcctgctccaccgcaccacgcgccgggtcagcccgaccagtgccggcgccgcctactacgcgcagtgcgtgcgcctgctggccgagttcgatgcgctggaggccagcatcggcgcgcaggcactggagccttccgggacgctgcgcatcaacgcccccgtcagctggggcattgcccgcctcggcccgctgctggcccgctaccgcgagcgcttcccgcaggtggaactggacctggccctgtccgaccgcctggtcgacatggtcgaggaaggctacgacgtggccatccgcatcacccgcgaaccgagcccggcgctgattgcgcgccgcctgggcgagtcacgggtgagcctgtgcgcggcgccggcctacctggccgcgcgcggcaccccgcagcatccgcaggagctgcaggcccacgcctgcctgagctacagctactgggccgccggtgaccactggccgctgcaggggcctggcggcgaggtcaaggtggcggtgaacagcctgctgcacgccaacaacggcgacgtgctgcgcgaagcggcgatcgccggcatgggcgtgatcctgcaaccggatttcctgctggaagacgcgctggccgatggccgcctggtgcgcgtactgcccgaatgggaggcctcgccgatcggcattttcgccgtctataccagccgcagccacctcgcaccgaaggtgcgcagtttcatcgaccatctggtggaaagcggggtgtag

SEQ ID NO: 536489 - DNA, 2109 bp, Stenotrophomonas maltophilia
gtggcgatcgtgctggcctacatcgtggtgttgctggtgctgctgtacgccgtccgccgcagtacccgcagccagcaggcgatggccgaggaactgaaggccggccatgccgagctgcgcctggcgcaccaggtcgggcgtgtctgcacgtggtacgtggatgaggacgccgcgctgctgcgctggtcgccgctggcccgcgagatctttggggtacagaccgacgccttgccggttgcggatttcttcgcgcgcgtgcatcgcgatgatgccgcgcgcctgcagcaggcgttcgaccaggccttcgccggcggcgcggtgctcgaccaggtgttccgcctggtgctgcccggaggcgaggtgcgctgggtcggcgcgcgtgggcagcgggtggaagtggccgacagcgaacggcgcatgatcggtgcactgaccgacctgagcgaacgctatcaggcgcgcgagcagatgagcgaggtggaacgccgcttccgcctgctgttcgaccgcaatccggcgccgttctgggtgttcgacccggatacgctgcgcttcatcgaggtcaacgacgctgcggtgcgccagtacggctacagccgcgacgagttcctggcgatgagcatcctcgacatccgcccgcgcgaaggctgggacgaagtgcgtggtgccatccagcgggcgcaggtgggcgatccgcccgacgcgaccgtgcgcctgcaccggcgcaaggacggcagtgtgttcgaggtgcgcgcgcacctgtccaagctcgatttcgacggacagcccgcgtgcctggtgctggccgaggatgtcagcgagcggctggcctacgagcgcgacctggcctaccaggcacggcacaacccggccaccggcctgctcaatgtgcgcgccctgaccgagcagctggacgagcaggacgccggctataccatcgccttcgtgcagctgcgcggcctgcagctggtggccgacacgctcggtcgcgagatcggtgatgcggtgctgcagtcgatggcgacccggctcgggggccttggcgcgcgctgtggcacgctggcgttccagccggccgaggacttcgtgttcgccatcggtgccgagcacgatacccagcgcgtgctggacgacctgctgcagatcgtgtcggcgccgatgcgcggcaaggactcgctgcaccagttcgagccgcgtatcggcgtggccgtgcacatcgccggtgacgggcacacggccgagcaggtgatcggcatggccgcgcaggctgcgcatgcggcgcgcgccgagggcaacgtggtggtctggttcgacgcggccgtgaccacgcgcctggccgaccgcctgcgcctggccgggcgcatccatgccgccatcgacaacgaattccagctgtatttccagccgatccggcatgccagcgacggcagcccggcagcgctggaggcactgctgcgctggccgcaggccgatggcagcttcatcccgcccaacgagttcatccagctgtgcgaggacaccgggttgatcctggcgctggggcgctgggtgatccgcgcggcggcgaaggcgcagcgccgtctggtcgacgccgggtggggcgagctgccgatcgcggtcaacgtgtctgcggtgcagttcttcaacagcgatctggtggctgaattcacccgtgcccagcaggacttcggcctggcccgtggcgcgctgcacgtggagctgaccgagagcagcctgatgcgcaagccggcgcaggcgatgcagaccatgcagcgcctgcatgagcagggcatccgcgtgtcgctggatgatttcggcaccggctattccagcatgtcctacctgcagcacctgccgctggacatcctgaagatcgaccgcagcttcgtcgccgacgtggaaaccaacccacgcaatgcctcgatctgccgcgcgctgttgtcgctggggcacagcatgggcctgaccatcatcgccgagggcgtggaaacgccggggcagctggactggctggccgcgcacggctgtgaccaggtgcagggctatctgctggggcggccggcgccgctggagcggatcatcgacgcgctggatgaagtcgccgcctaa

SEQ ID NO: 536490 - DNA, 933 bp, Stenotrophomonas maltophilia; identical to SEQ ID NO: 502446

SEQ ID NO: 536491 - DNA, 2112 bp, Stenotrophomonas maltophilia
atgtccaagctgcgccgtcccaccctggcgctggccatcgtcgccagcctgtccctggccgcctgtgaccgcccggccgacccggccgccacggccaccgccccggccgacgccgcccccgctgcggccaagccgatgctgggcagtttcggcttcgatgccagcggcatggaccgcagcatcgccgccggcgacgacttcttcggcttcgccaacggcacctgggtgaagaacaccgagattccggccgaccgctcgcgcttcggcagcttcaatgtcattgccgagaagaccctggccgacacccgcgccatcctggaaggggccgccggcaacacccaggccagcggcgacgacaagctgatcggcgactactacgccgcctacatggacgaagccggcatcgagcagcacggtctggcgccggtgcagccgcagctgaaggccatcgatgcgatcgccgacaaggccgggctggcgcgcgccctcggcggcgacctgcgcgccgacgtcgacctgctcaacgccaccaacttctacaccgaccgcctgttcggcctgtgggtgtcggtggacatgctgcagccggaccgcaccgcgccgtacctggtgcagggcggtctgggcatgcccgaccgcgacttctacctgggcgatggccgcatggccgagctgcgcaagcagtaccaggcctacatcgcgcagatgctgcagctggccggcgtcgccgacccggccggcaaggcgcagcgcatcctcgcgctggaaaccaagatcgcgcaggcacatgccacccaggaagaaaccaacgacgtgaccaagggcgccaatccctggacccaggccgacttcaatgccaaggcgccgggcctggactggaacgccttcctggatgcagccgcactgggcaaccagcaggacttcatcgtgtggcagcccaaggccgtggccggcctgtcccggctggtcgccaccgagccgctggacgcgtggaaggactacctggcgttccacgcgctggaccgtgccgccgcttacctgccgaagaagttcgccgacgcccgcttcgccttccatggcaccgcgctgagcggcacgccacagcagagcgatcgctggaagcgcgcggtggacgatgccaaccatgcggtcggcgaggccatcggcaagcgctacgtcgagaagcacttcgacgccaggaccaaggagcgcgcggacgagatggcgaagaacatcatcgccgccttcagcaagcgcatcgacgcactggcgtggatgtcaccgcagaccaaggcacatgccaaggccaaggtggccggcttgaccgtgggcatgggctatccggaaaagtggcgcgactacaccggcctggaaatccgtcgtgatgacccgctgggcaatgcacagcgcgccgagctgttcgagtaccagcgcaacatcgccaagctgggcaagccggtcgaccacagcgagtgggcgatgctgccgcagaccatcaatgcgatgaacgtgccgctggaaaaccgcctggtgttcccggccgcgatcctgcagccgccgttcttcgacggcgccgccgacgacgcggtgaactacggtgcgatcggtgcggtgatcggccacgagatcagccacggcttcgacaacgccggtgcgctgttcgacgagaccggcaagctgcacaactggtggaccgacgaagacctgaagcagttcaacgcggccggtgatgcactcgccgcgcagttcagcagctacgagccgttccccggcgtgcatgtgaacggcaagctgaccctgggcgagaacatcgccgacgtggccggactgggtaccgcctacgatgcctaccagctgtcgctgcagggcaagccggcccagaccctggaaggcttcagcccggaccagcgcttcttcctcggcttcgcccaggcgtggcgcagcaagagccgcgagcaggcgctgcgcaactcgctgctgaccgacgtgcatgcaccgggccagttccgcgcgctgaccgtgcgcaacatcgacgcctggtatccggcgttcgaggtgaaggaaggccagaagctgtacctggccccggacaagcgggtcaaggtgtggtga

SEQ ID NO: 536492 - DNA, 930 bp, Stenotrophomonas maltophilia
atgccggccttgctgcagcgactctcccgccccgtgaccgcgccgatccggcgctgggtactggaggcctttccacgcgggcagagcggcatcgattacgaccatccgcagggtgatccgggctggtttggcccggacagcgtgacctggcgcgtgcatgccgagctgccgtcgatgcttgccggcggcctgtgcgcattgatgctgcagacgctgcacccacgcgcgctggccggggtctacgaccattccaacttccgccaggacctggtgggccggctgcgccgcaccacggccttcgtggccggcaccagctatgcgcccaccggcgaggtggaagcgctggtggccagggtgcgccgcatccacgcgcagatccgcggccgcaccgcgcagggcgagccctatgccgccgacgatccgcaactgctgacctgggtgcacgtgaccgaagccttcgggttcctgcagggcttccggcgctatgggcgcgaggtccccgcgcacatcgccgaccgctactacgatgagtaccgctgcgtggccgaggcgctgggtgcggtggatgtaccgcgcagcgaagcggaggtgtcggcgtatttctgcgcgcggcagccggaactgcgcgtggatgagcgctcgcgcgaggtgctggaggtactgtccggcgtgcgcctgccggtcccggtgccggggctgtcgcgcgacgtgttcctgggggcgggcgcggcgttgctgccggactgggccgcaggcatgctcgagcgcagcggccgccagcgtgcgcaggcggcggcatcggcgaagctgatgcagggcatgtcaccgctgttccgccgcgcgctgcccgatggcctggccagccatgcctgcgcgcgcatgggcgtaccggtggagatcctgcgggcgtggcccgccgttcccaggtag

SEQ ID NO: 536493 - DNA, 615 bp, Stenotrophomonas maltophilia
atgattgctttgttcaagggtttgggaattctgcttcgcgacaacgagctctacagcagcccgttcgacaaacaggtggcgcactggcgcaacctgagcgagcagcagatccgcgatgaagtggcggtgctggcccaggcgaagtgccagtggctgatcgcgtcgatcgttggctggcaggcggcctcgctgctgatcctcggcctgatcgccaactacctgtggcgcgacgatttccatatcaccttcacccgcgtggtgatcgtcttcggctcctgggtctcgatcctgttcgtgatctggttcatggccaacatgttcgatcagcaggccggcttcgagcgctggatgaaggccttcaacagccgcgcccgcatcagttccaaggccgacagcgtcgagcacgtggccgaggcgctggacctggccgagcactacccggaagtgctggactacaagcaggcggtcaccgccaagcgcgaactgcgccacgaggacatccgcatcatgaccgagatcgggcggatgaagcagcactcggaactggtcgggcgcctgaaccacgtcggcgaaaccgaacaccatcacgagctgacgctgcagcctgcctactga

SEQ ID NO: 536494 - DNA, 345 bp, Stenotrophomonas maltophilia
atgtcccgtctactgattgcgtgcgttgccgtgctggcactggccggctgcgaaaaatcccgcaacacctcgatcacccggacccaggccaacggcgtggatacgctgtacagcaagagcacggtggtcgagggcgaagcccgcttccagtgcatcgccagcagcagtggcgcctgccattacctggtgcttgatccggcctgcagccccgatgccgcgtgcaccacgccgccgctgcgccggttcactgttgcagtgggcaagaccgaggccatgcgtgacctgcccgacggcttccgccagtgcgtcagccaggacccgatggaacactgccaccgtgagtga

SEQ ID NO: 536495 - DNA, 771 bp, Stenotrophomonas maltophilia
atgccgcttgaagccctgatcgccgaagacgaagagctgctgcggcagtcactggtggagcagctgggccggctgtggccggagctgaagctggtggccgagtgcgaggacggtgccagcgcgctggagcagctggccgagaaacagccggacatcgccttcctcgacatccgcatgcccggcatcagtggcatcgaggtggcacgttcgctgtccgagctgagcccgcgcacccaggtggtgtttgtcaccgcgtacgaccagtacgccatcgacgcgttcgagcagggcgcgatggattacctgttgaagccggtcagcgacgaacgcctgttggcgacccgcgagcgcatcctgtcgcggctgccgtcgacgcggcaggacgatgccgtgctcgagcgcctgctgcagcggttgggcaccccgcagggcgcggcggagcgcccgccgctggcctggatcaccgccagcaacgggcgcgagacgcagctgatcatgctcgaggacgtggcctacttccgcgccgacaacaagtacaccaccgtggtcaccgccgctggcgagagcctgttgcgcacgccgttgcgcgagctgctggaagtgctcgatgcgcagcatttccgccagatccaccgttcgaccatcgtcaacatgaaggcggtggcggcggtcagccgcgacgataccgggcgcggcgtactgcgcctgcgcgggcgcacggagacgctggtggtcagccagccgttcatgagcctgttccgcggcatgtag

SEQ ID NO: 536496 - DNA, 1260 bp, Stenotrophomonas maltophilia
gtgttcgccagcctttcactcctgttccgtcacctgctggcctgggccgcggcgctgttcgtcgcgggcatggtctggagcggcatcttcagtggcatgaacgatggcccgggctggatcttcgggctgctggcgatgttcctgatcatttccgcgctcggcagtgccatcacccacatccgccgggtctggctggtggccggtcgcctggatgcgaccaccctgtccggccgccagcgccgccagatcgaactgccgatggacgccggccacgccttctcggtggtcgaggcggcgatctccgaactgccccgcgtggaagacgtggaaagttcggccggcagcctgcaggtgcgtgcctatgtccgccgggtcgacctctggaacggtcgccagccctcgcgctggaacctgccggcgcggctggcgatcaagcgcaacagcgtgctggccacggtgacgccggggcagggcaccagcaccgtgaccctgctgttcgaacccgacgcgggttggtgggccgacctgctggcgctggatgaaggcagcaactacgagaatgccgaagcggtcacccgcgcgatcagccgccgcgtcggtgaccagcgccgcgacgagcaggccgcggccgaacagacgcaggtggaaaaggaactgtcggtcgcgcggctgaacctgctgcacgcgcaggtggaaccgcacttcctctacaacacgctggccaacgcgcaggtcctgacccgcaccgatccggcgcgtgccgagcagatgctcggccacctgatccagtacctgcgcagctcgctgccgcaggtggatgagtcggtatccacgctgggcgtggagctggaccgcacccgcgcctacctggagatcctgcgcatccgcatgggggcacgcctggcggtggaagtgcaggtgcccaacgaactgcacagcgtccacctgccggcgatggcgctgcagacactggtggagaacgcgatcaagcacggcctggaacccaagcccggcggcggtacgatctggatcctggcgcgcggcttcgacgaccacgtgaccgtgaccgtggccgacgatggcctcggcttcggccacggtaccagcggtaccggcatcggcctgaagaacctgcgcgagcgcctgcgcctgacctgcggcgagcaggccggcgtggcgatcgtggccaacttccccagcggcgtggccgcgaccatgaccctgccgcagtcgaacaaggagcgcagccatgccgcttga

SEQ ID NO: 536497 - DNA, 1650 bp, Stenotrophomonas maltophilia
atgaaacgagcggtactgggcgtgctggccctgtcggtgtcgagcgcactgatggcggccaccccgaaatttgatggcgcgcggatctccgccgacgtcaaggaactggcctccgatgcctacgaaggccgctcgccggccaccgctggcgaagcgaagaccatcgcctatctcagcaagcagttcgccgatgccgggctgcagccgggcggcgacctgaaggacggcaagcgcctgtggacccaggccgtaccgctgcgcaagggcgacatcgtcggcacgccgcagctggcgctgcaccagggcggaaagaccgttgcactggagcagggcaagcagatcgccgtgcgcgcggccatgaacggcgccagcagcgtcgacatcagcaaggccccgctggtgttcctcggctacggcgtgaaggcaccggagcgcaactgggacgacttcaagggcgtggacctgaagggcaagatcgccgtggtgctgatcaacgacccggacttcgaaaccggccagggtgatttcgacggcaagggcatgacctattacggccgttggacctacaagtacgaggagggcgcccgccagggggcactgggcgtgctgatcgtgcacgagaccgcaccggcgtcgtacggctgggccaccgtggccggttccaacaccaacaccatgttcgacgtggtgcgtgacaacccggcagaaagccatccgctgctggaaggctggatccagcgcgaccttgccgtggagctgttccgctcggccgggcaggacttcgaggcactgaagaagaaggcgcagcagcgcgacttcaccccggtgccgctgaccggcgccagcctggacgcgacgtacgcggtgaagaccgaagtgatcacctcgcacaacgtggccgcgcgcctggaaggcagccgccatccggacgagaccatcatctacagcgcgcactgggaccacatcggcgtgggtgagccggatgcacggggtgaccgcatcttcaacggcgcgctggacaacgccagcggcaccgcctcgctggtcgagctggcccgtggcttcgccaaggagaagcgcccgcagcgctcgctgctgttcctggcggtcaccgccgaggaaaagggcctgctgggttcggagtactacgccacccatccgctgtacccgctggaaaagaccgtggcggtgatcaacatggacggcatggcgccgttcggcccgtcgcgtgacttcggcatctacggtgccgcgcgcttcgagctgctggaccagctgaaggacgtggccaagggctgggacatccgctacacgccggacccgaagccggaagcgggcctgttcttccgctccgaccacttcccgttcgccaagcgtggcgtgccggcgctgtcctggtcggccggccaggactgggtggacggtggcgtggccgcaggcaagaaggcctccgaggactacaccgccaagcgctatcaccagcagggcgacgaatggcagccggactgggtgttcgccggtgccgcccgcgacctggaagtgctgtacacgctgggcaaccagctggccaattcccgcgattggccgaactggagcaaggacgaggcgttccgcgccgtgcgtgacgccagcgccggccagcgcaaataa

SEQ ID NO: 536498 - DNA, 1653 bp, Stenotrophomonas maltophilia
atgcgtacgacctcccgcctgatcggcctgggcctggccacggtgctgcttgcagcctgtggcaagcaggacaccccggccgccgatgcgcccgcacccgccaaggaaaaggcaaccagtgcactggccagcaatacgccagtcgaagcagcgcccctgcgtggcacgccggatttcggcggcaccacccaggtcgcgcgcgaggccgacggtatcggcagcaccccggaactggcggtgctggcggcactgcagtcggcggtggcgcaggtcaacggcgtacgcgtggccagccagatgcagagcctgcgtgcaggcctgcatgtggacgtggatgacgaacacgtcggcgatatccgcgccgacgcgttcacccagcagatgatcgccggctcgcagggcgcagtgctgggctatgaaatcctgtcgcaggacgaagtgcggcagctggatgaagaaaccatcgcccgcgtgcgcgccagcgacgaaggctggagcttcaagggttcggcctctgccagcgcgtccggcgaggccacggccaagggcggcggtgcctcggccagcgtcaaggagagctacgacgagaaggtcagcgtcgatgcccagcgtggcgcacgctcgttcgattcggacgtgacccaccgcagcatgcgcagctactggaaggtgcgcgtgcgtgcacagattgcccaataccgcgcaccggacgagcagggcaagccgaagatcgtggtcgcgctgccgcgcaccagggccggcagctatgccgtgggcgatggccgcgtgagtgccgatgaagtggccgacgcgatccgcgcgcgcctgtccgacacgctgacccagacccagcgcttcatcgtgctggaccgcgaattcggcgacgaactgcaggccgagatcgaccacatcaacagtggcaacgtgcgtttgcaggacaccgcacgcgtcggccagcagctggcgaccgacctgatcctgatcccgaccatcgaacgcttcgagtacccgcgcagcgtgcgcaacctgcgcatgtccgaccgccaggtgacctcgtattccggtggcggccgcatcaccctgcgcctgatcaacgccaccaccggccaggtggtgatgtccgacagcttcgaccaccagctggcctcgaccggccccagcaccctgccgcgcgtggtcaacggccgcaacatggctgcggcgatgatggaatcgttgtccggccagatcggtaccaccatcgtcaccacgctgttcccggtatcggtggtatcggtggacggtaaccaggtggtgctgagccagggcggcgagaccctgcaggccggccagcgctggcaggccgtgcgcctgggcgaggaactgaaggacccgcagaccggccgctcgctgggccgcagcgaacacccgtgctgcaccatccgcatcgaccgcgtggctgcacagacctcgtacggcaccctcgaagacggcgtcgacgcgatgcgcggcggtttccgtccgggccagatcgaactgcgccagaagctgggcagcaagcccgctgccgccgccagcgcgaccgcttcggcggccccggctgccgccgcccgcccggccgccaagccgaagcccaagcctgctgccgccccggccgaagacccgaactggtaa

SEQ ID NO: 536499 - DNA, 678 bp, Stenotrophomonas maltophilia
atgatccgcaataccgctcttgtcgtggccatcgccgccgctaccctgtcgatgccggcgcacgccggcctgggcaagctgaaggacctggccggtgccgccaccggttcctccaccagcagcgcctccagcgccgccgctccggacgaagccgcgcaggaagcgctggtgcgccgtttcgtcagctcgcagtcgcactcgctgcaggcccagacctcgttcgcccgcgccttcggcctggccgagcaggtgcagctgctggaagccgagcgccaggcgctgtcgtcgggttcggtcagcgtcgatgcgatgaagaagtcggtgtcggtcagtgaagccgcccaggccgcgatcaacgagcgccaggccgcgcagccggaactgaacgctgaatccaagcagcactacgccgaaggcctggtctcgctgctggcgtcggccgccgaagcgcagaagctcggtggcgaggcgagcaacttcactgccggcatgaagaacctgggcgcaacccagatggcgaccgttggccgcaagctggcggcaggtgcctgggttgccaaggaatcgccgggcttcatccagggcctgtacggctcgaccaagtcggccgtgaccttcgccaagaagagcaaggtgaaggtgccgtcgaacgccgattcgatgctcgactcgatctga

SEQ ID NO: 536500 - DNA, 525 bp, Stenotrophomonas maltophilia
gtgtcggtcaccagcggcggcagcaccaccgcgcgcgccgacaacatcacctggaaggtggccaacgccgccgaagtcaacaccgcgatgaccggtgcgttcagtgctgccggctacgaagtggtggaagcggagtacgtggaaggcgagtcgcgcggcctgctcagcatcgagcgcatccgcaaggacttcagcaccggcaacgacctggccccggccaccctgcgtgacaccgccaacggcatccgcgcggccaacatcccctacatcgccgtcggcacgctcgacgtcggcatgcgcgaccgcgatccggccagtggcaacacccgcgtgttcgtcaccgtcaccggcaaggtgctggatgtgaccggccgcttcccgcgcaccgtgtcgtcggtgggcccggtgcagttctccggtaccggcccgaacgaaaccgtggcccgtaccaatgccctgcagctggctgccgaaaaggcggcccagcagatgatcaacgaactgaacgtcaaggcggtccgctga

SEQ ID NO: 536501 - DNA, 471 bp, Stenotrophomonas maltophilia
atgtcgttgatgcgtaccatcctgctcatcctcatcgcgctggtggtggcctcgccggtcgctgcacagaccgcgagttcgcgcggcaccggctcggccagctacggcctgcgcctgagcgccgatacccgcacccaggccctgaacaaggccaaggtcaacgcactggaggcatacatcgccgaaaccggtgcggccaagctgcgcctgttcgaagcccgccgcgccgagttcgtcggcgagatcgaccgctacgtgctcagcgccgtgcagctgtcggacaccgaagacaagaaggccaagacctacaccgtcaccgtccgcgccgagatcaacaccaccctgctgcagaccaagctggatgcgggttcggccgtggccggcgccaccgccgcacagcgctcgctgctgaccttcctgttcatggcgcgctcgcaggacaccgtgcagtcgttccaggacaaggaataa

SEQ ID NO: 536502 - DNA, 1197 bp, Stenotrophomonas maltophilia
atgtattcaaggacgaagagcgcatcgcgcgcttttgcgcgcctgcttgcctgtgccctgtgcctggccgtatggccgatggccgtgcaggccgccgacaaatcacagcaggcctattgggccgggtttgcctacaccgccgacgccgctgccgtgcaggcgaccacgccgcatgcgcacgccgtgctggaaaaacgcggcttgatcccgctcaaccaggcgctggcacagtcgctcaagcgccgagccccggcccacctggagctgatcgaccagccggtggcgatgctggacggcaccaccagcgcgaccgtgctggccgccgcgctggaccgcgaactggtgtcggtcgagccgatcggcgaccagtacaaggtgctggtggaagtggcgctgcaggcgctgttcttcgacttccgcgagcgccaggtgattgcctcctatccgctcaccctgcagcgcatcgacgtgcaggactaccgtcctgacaacgatgatatcgacgcgatcgtcgccgatctgctgtacggcagcgccgagaccagcctgtcgcaggtactcgcggccagcctggcacaggcccggctgcccgacgccgccgtgcgccgcctgcaggtgggcggggtgaccctgtccgatgcggtgcgcgccaagctgcccgacccgaaatgggaagcgacgctgcgcgcgacgctggcgcacgagttgtccaagacgctgtcgtccaacaccggcgtcggcctgctgccaccggcctcgggccaggcgatcggcggtgcgatggccgcccgctttgccgatggcaaggtctaccagctgaagattcccgaacccgactacgtcatcaccctgcaggtcgacgcgctgaagaacggcgtgatccaggaaaccccggcgatgaagacgatgctgttcggtgcgttcttcaccgccaaggtgaccgagccgttctcgggcaaggtctatttcgaacagccgctgcgcaagggggccaccaaggtggtgccggtcacgcagtggcaggttgaccagtggtcggccagctacgaaaccctgctggccgggctcgacgccttcgccggcgccgctgccaggcgcgccgattcgcgcgcgtggctggacgaacagaagccgggcggccgcccgttgcagcagcagacccaagccctccaggagttgatcaagtcatgtcgttga

SEQ ID NO: 536503 - DNA, 1263 bp, Stenotrophomonas maltophilia
atgctcgatcccgcactgacgcagcgtctggaaaccctctggcggatggagtcgccagtgttgatcgcgcgcctggcgcggctgctcggcggcgatgtcggccgtgccgaggagctcgcccaggacacctggctggccgcgctggagcgctggccggagcagggcatcccggacaaccccggagcctggctgatgaccactgcgcgcaaccgcgccatcgatgtgctgcgccagcaccagcgggtggcacagcagcatgcgcagtggggcgaggaactgcatccggcggcactgccggcgccggatgacagccaggcactggaggacgacctgggcgatgacctgctgcggctgatgttcgtggcctgccatccggtgctgccggccgatgcgcgggtggcactgaccctgcgcctgctcggtggcctgaccaccgtcgagatcgcgcgtgcgttcctgcagctggagccgaccatcgcccagcgcatcgtgcgcgccaagcgcacgctggcgcagaagcaggtgccctatgaagtgccgcgcgcggacgcgatgccggagcggttggcctcggtgctggaggcggtctacctggtgttcaacgaaggctatgcggccagcgccggtgacgactggatgcgtccggcgctgtgcgaggaggcgctgcggctggcgcgcatcctggcccatcgcctgccggtgccgccggtactgggcctgctggcgctgatggaactgcatgcctcgcgcgcggcggcacgcatggatgcacagggcgcgccggtgctgctggaccagcagaaccgcgcgcgctgggactggttgcagatcgaacgcggccagcaggtgctggcgcgcgcgctggcggccggtggtggcgacgatccctatgtcctgcaggcgcgcatcgccgcctgccatgcggctgcgcggcgcgccgacgcgaccgactggccgcgtatcgccgcgctctatgcacagctgctgcaggtgcaaccttcgccggtggtggcattgaaccgggtggtggcgatcctgcgcagcgaaggcccgttcgccgcgtgggcgcagctgcaacccctgctggtcgacgcgcgcctgcgcgactatgcgccgctgcaggtggttcgtggcgagctgttgcaggcactgggccgtgagcaggatgcgcgtgacgcttttgccgcggccgccgaactcagccagaaccgcgccgagcgcggactgttgcggcgacgggcgggactaccgcccacggactga

SEQ ID NO: 536504 - DNA, 357 bp, Stenotrophomonas maltophilia
atggcttacgtggatgcttacgtgctgccgtgcccacaggacaaggtggcggcttaccgtcgccttgcccgcaaggccggcgcggtgtggaaggaccatggcgcgctgcagtacatggaatgcgtggctgacgatgtggaaccgggcaagcgcacctcgttcccgcgcgcggtcaaggcaaagcccggcgaaacggtgatcgttgcgttcgtggtgttccgttcgcgcgcggcacgcgaccgcatcaatgccagggtgatggccgacccgcggctggcgtcgctcggcccgaaggacatgccgttcgataccaaacgcatgttctggggcggcttcaagcccatcgtcgaagcgtga

SEQ ID NO: 536505 - DNA, 411 bp, Stenotrophomonas maltophilia
atgagtgcaccacaaccgcagatgatcttcgtcaacctgcccgtgcaggacctgaacgcgtccaaggccttcttcgccgcgctgggctacagcttcaacccggccttcaccaacgacgatgccgcctgcatggtcatcagtgaaagcatcttcgtgatgctgctgacccagccgttcttcaagcaattcaccaccaagccgatcgccgacgcgcgcagccagaccgaggtgatcacctgcctgtcggcggacagccgcaaggcggtggacgcgatggtggacaaggcactggccgccggtgccagcgaaccgcagccggcgcgcgattacggcttcatgtaccagcgtggcttccaggacctggatggccatctctgggaaatcgcacacatggacggcgagccgggctga

SEQ ID NO: 536506 - DNA, 423 bp, Stenotrophomonas maltophilia
atgaaactgattcccttcctcggcttcagcggccaggcccacgaggcgatggcgttctacgccaaggcactcggtggccaggtcacttcggaaatgaaataccgcgacatgccgccgtccgatggctcgccgggctgcaacgagatgccgccggaaaccctggaccacatcgcccacagccagctggagatcggcaacgccatcgtgatggcggccgacggccccggcggcggcgaggtcagctcgaccaccatcaatgtcgacgtcgacagcgtcgaagaagccgaacgcgtgttcgcggcactggccgaaggcgggcaggtgcagatgccgatcgccgaaacgttctgggcgcaccgctggggcatgctgatcgaccgctacggcaagccgtggatggtcaactgcatgaagcagccctga

SEQ ID NO: 536507 - DNA, 414 bp, Stenotrophomonas maltophilia
atgaaagtgatggtgatcgtgaaggccaacgccgactccgaagccggccgcatgcccagcgaacaggaattgtccgaaatgggcgccttcaacgagcaactggtcgcggccggcatcatgttggccggcgaaggcctgcacgccacccagcgcggccgccgcatccatttcggtggcaccgccccccgggtcgaggccggtccgttcggcccggccaacgaacagatcgccggcttctggctgtgggaggtgcgctcgctggaggaggcggtcgaatgggccagccgtgcgccgttcggcagcggcggcacgcttgaactgcgtccgctgatgtccgcggaagacttcggtgaggccttcacccccgaattacagcagcaggaacagcgtctgcgtgctcagctggaaggttga

SEQ ID NO: 536508 - DNA, 1047 bp, Stenotrophomonas maltophilia
atggattcattgacccagatcgtgctcggcggcgccgtcgctgctgccatcgctccgcccggccatcgccgcgcggccctgctggccggtgccgcgcttggcaccctgccggacctcgacgccctgtggctcggcttcaccgcagccgacccggtggtgaacatgatcgagcaccgcagcttcagccattcgctgctggtgctgccctgggtggcggcgctggtctggtggctgttcaagcgcttcggcaacggtcgggtcgcacagtcacccgtgcgctggttctgggcgatccagctggcgctggtcacccatcccgtgctcgatgcgttcaccgtgtatggcacgcagctgtggtggccgttgcggccacacccgaccatgggttccagcgtcttcatcatcgacccgggctacacggtgtggctgctgctgggctgcgtgctggcctggtttggccgcgcccggccgtgggtgggcaaggtgctgggcgtggcgctgctgatcagcagtggctacctgggctggggcctgatcgccaaggcgcaggtcgaccgtgccgcgcagcagagcctggccgcgatgggcctgggcgatgcgccgcgcttctcggtgccgatgccgttcaacaccctgctgtggcgggtggtggcgatgacgcccaacggctacatggtgggtgatcgctcgctggtggccgaccacgggccgatgcggttcgaaggccatgcgtccaacgtgcaggccttgcgcgaagcgggagacatcccggcggtgcagcagctgcagtggttcaaccgtggcttcatgcgtgcacgggtggtggacggccggctggtgctgagtgacctgcgcatgggcctggagccggactacaccttcaacttcgtcgtggccgagcaggccgacgggcagtggcaggcgatcgttcccgagcaggtgcggatggattaccgcagtcgagccgcgcgcgccgacgccggtcgccggctggccgtgatgtggcagcggatctggcatgcgcccgtagccggtgccgccgagtag

SEQ ID NO: 536509 - DNA, 801 bp, Stenotrophomonas maltophilia
atgagcacgctggcgaacctgtcgccgcaccggcgcgcagtgttcgtctccgacgtgcacctgggttcacgtcattgccatgccaccgagctggcacggttcctgtcgcagctgcgctgcgaacggctgtacctggtcggcgacatcatcgacctgtggtggatggcgcatcgccgcgccaactggcggcagtcgcacagcgacgtcatccaggccctgcacgcgctgcgccgttccggtaccgagatcatctacattcccggcaaccacgacgcatcgctgcgccacgtctgcggggtgatgctcccggccatgcaggtacgccgccgcgccatccacgtgaccgccgatggccgccggttgctggtcgcgcacggcgacgagtacgacggcgtgacccacttcggcggcctgcaggaaaagttcggcgactggctgtactaccgcatcctgaccggcaaccaggccttgaatgcagtgcggcggcggctgggcatgcgctactggtcgctgtcggagttcctgaagaagcgcagcggcgccgctgaacgctacatcgagcgcttcgtgcaggccgggctggacgacgtgcgccgacgcggcctggacggcatcgtctgcggccacatccatcgtgccgcactgcttgaacgcgatggcctggtctatgccaacgatggtgactgggtggagagcctgaccgcactggccgaagaccacgatggcgcgctgcgcctgctggaccacaacggccagaccctggcggaactgccaggcgcgcgcttgtcgcaggcagcatga

SEQ ID NO: 536510 - DNA, 1716 bp, Stenotrophomonas maltophilia
atgcaggaactcgaacagcgcctccagcaacgcttcccggactggttccatggccgtcgtggccaactggcgcggccgttgctgcgcagcgtcggtcgctggtcgcggctggaccagatcgaagccttcctgcagcgcagtgcgggattgcgcggcttcggcttcgtcgccgccggcctggaattcatcggtggccagtaccaggtggatccggccgcgctggccaggattccggccaccggccgcctgctgatcgtcgccaatcatccttccggagccctggatgcgctggcgctgctggacgcggtcggccgtatacgccgcgacgtgcggatcgtggccaatgacctgctgggggcgatcgcaccgctgcaggatctgctgctgccggtgcgcatcctcggcggcaaggcgcagcgcggcagcctgcacgcggtggagcaggcgttggccgccgagcagtgcgtgatcgtgttcccggccggcgaggtctcgcgcctgtcgctgcgcggcatccgcgatggccgctggcagcgcgggttcgtccgctttgcccgcgccgccggggcaccggtgctgccggtacgggtggaggcgcgcaactcggcgctgttctacggcgcctcgaccctgttcaagccggccggtaccgcgctgctggcacgtgaaatgttcacccgtcgtggccgcccgctgcggctgagcatcggcgagccgatgcagctgggcaagggcggtgacccgggcgcgcagctgctggccgtgcgccgtgcgctgtacgcgctgggccgcaacggcgcggccgaccctgccgctgcgttcaccggtcccgagccgttggcggcgccggtgccgccttcgcgggtcgccgccggcattgccgcagcgacccagctgggccagaccgccgatggcaagcagatcctgctggccacctgcaccgccgattccccgctgctgctggagctgggccgcctgcgcgagctgaccttccgccaggtcggcgagggcaccgggcgcagccgcgacctggacgactacgacccacggtacgagcacatcgtgatctgggacgcggccgcgcagcgcatcgccggtgcctaccgcatcatgcgcggtgcgcaggccctggcccggcacggcctgtccgggctctacagcgcgtccctgttccgctattccgacgatgcgatcacccacatcgccgagggcctggaactgggccgcagcttcgtggtgcccgactactggggcagccgcagcctggattacctgtggcagggcatcggcgcctacctgcagtgccggcccggcatccgctacctgttcggcgccgtgtcgatcagcgcggcgctgccgcgcgaggcacgcgagcagctggtggcgtactaccagcgctactacagcggtagcgccggcctggccgaatcgaaccgtccgttccagtacttcgccgcgccgccgagtttcggcgagctggatgcaggcgcagccttcgatgtgctcaaggccaacctggccgcgctcggcaccggcgtgccgacgctgtaccggcagtacaccgatctgtgcgaacccggcggcgcacgtttccttgcgttcggcgtcgacccggacttcagcgattcgatcgacggcctgatcgaagtggacctgtgcgcgatccggccaaacaagcgcaaacgctatctgcgcgacgcggggacgccggcatga

SEQ ID NO: 536511 - DNA, 1212 bp, Stenotrophomonas maltophilia; identical to SEQ ID NO: 508018

SEQ ID NO: 536512 - DNA, 507 bp, Stenotrophomonas maltophilia; identical to SEQ ID NO: 508019

SEQ ID NO: 536513 - DNA, 2712 bp, Stenotrophomonas maltophilia; identical to SEQ ID NO: 508020

SEQ ID NO: 536514 - DNA, 2517 bp, Stenotrophomonas maltophilia
atgagcatgcacgcgcgccgtacgcggcgctggaccggcctggtcctgtcgatgggactgctggcggtggtcccgctggcatgggcggccgccccgcagtcggctgcggcaccggcccagggcgtgaccggctatgaattgccgtcggccgcgctgcaggcagtggtcgatgcgccgcgcgcgccgtcgctgttcctgtcgccacggcgcgacgtggccgcgatgatgcagatgccgtcgctgccgtcgatccaggtggtggcgcaaccggagttgaagctggccggcctgcgcatcaacccgcgcacgttctccgatagccgcttcagcttcggcgagaagctgtggctgatgaacgtggccgatggcaaggaacggccgatcagcggcctgccggccacgctgtcgatcgccagcctgatgtggtcgccggaccagaagtggctcgctttcaaccaggtcgacgccgccagcggtgccaatgaactgtggctggtggacgtggccgccggcagcgcccgccgcctggttgcgggcttgaacaccgtcatcggcagtggctaccagtggttgccggacagtcgggggctggtggtgttcacccgcccggccaacctcggtgcggccccggccaccgacggcatcccgaccggccccgccgtgcagcagacccgccagggcgatggcgtggtgtcgatccggacctaccaggacctgctgaagaacgaagccgacgcgcgccagttcgactactacgccaccacccagccggtggaagtcagcctggacggcaccacccgcgcgatcggcgcggccggcatcttcatgggcttctcggtgtcgcccgatggccgcttcgtgctgcgccagccggtgcagcgcccgtattcctacgtggtgccggtgagcagcttcccgcgccgcatcgaagtgatcgaccgcgccagcggcacgctggtgcacaccgtggcggtgcggccgctggtggaaggcctgccgaccggcaacgatgccgaagtgaccggcgtgcgcgacatcagctggcggggggatgccgatgccaccctggtctgggccgaagcgcaggatgggggcgacccgaacagggacgccaaggtgcgcgacgcggtgctgatgcaggccgcgccgttcgacaagccgccggtgacgctggcccagctgggcagccgcctggccggcatcagctggggccgcggtgacctggccgtgctgaccgaatcgtggtggaagacccgcaggaccaagacctggctgatcgctccggacactgccagcgccgaaccgcgcctgctgtgggatcgcgatgcgcaggaccgctacgccgatccgggccggccgctgctggccagcgacgagcgcggccgttcgctgctgcagaccagccctgatggcagcagcctgtacctggccggtgccggcgcgtcgccggaaggcgaccgtccgttcgtggatcgcttcgacctcgccacgggcaaggcgacgcgcctgttccactcgcaggcgccgagctattcgctgccggtggcactgctggacaaccagggcagctcgttgctgctgagccgtgagagcccggacgagccggccaatttcttcgtgcagtcgctggccgatgtcagcgccgcgccgcgcgcactgacccactttgcccatccgctgccgcagctgaagggcgtgcagaaggaacagatccgctacaagcgcaaggacggcgtcgacctgaccgcgaccctgttgctgccgccgggctacgaccccaggcgcgatggtccgcgcccgctgctgatgtgggcctatccgggcgagttcaagagcgcggccgcggccagccaggtcaccgattcgccgtaccgcttcaatgcgatcagttactggggcccgcaggcgttcctggccaagggctacgtggtactggccagcccgtcgatgccgatcatcggcgagggcgacaaggagccgaacgacacctatatcgaacagctggtggccaacgcgcaggccgcggtggatgaggtggtgcgccgtggcgtgaccgatcgcgaccacatcgccatcggcggccattcgtatggtgcattcatgaccgccaacctgctggcacacacccgcctgttcaaggccggcatcgcacgcagcggcgcctacaaccgcacgctcacgccgttcggcttccaggccgaggaacgcaactactggcaggcacaggacgtctaccagaagatggcgccgttcaactacgccgacaggatcaaggatccgatcctgttcatccacggcgtggacgacaacaactccggcacgttcccgatccagagcgagcgcatgttcgccgcggtgaagggcctggggggcaccgcgcggctggtgatgctgcccaacgaatcgcacgcctaccgcgcacgcgaatcgatcatgaccatgctggccgagagcgagcgctggctggagcagaccatcggcccggccgcgcagggcacggcgaagaagaagcgctga

SEQ ID NO: 536515 - DNA, 1446 bp, Stenotrophomonas maltophilia; identical to SEQ ID NO: 508022

SEQ ID NO: 536516 - DNA, 474 bp, Stenotrophomonas maltophilia; identical to SEQ ID NO: 508023

SEQ ID NO: 536517 - DNA, 486 bp, Stenotrophomonas maltophilia; identical to SEQ ID NO: 508024

SEQ ID NO: 536518 - DNA, 558 bp, Stenotrophomonas maltophilia; identical to SEQ ID NO: 508025

SEQ ID NO: 536519 - DNA, 732 bp, Stenotrophomonas maltophilia; identical to SEQ ID NO: 508026

SEQ ID NO: 536520 - DNA, 1047 bp, Stenotrophomonas maltophilia; identical to SEQ ID NO: 501998

SEQ ID NO: 536521 - DNA, 927 bp, Stenotrophomonas maltophilia; identical to SEQ ID NO: 508028

SEQ ID NO: 536522 - DNA, 828 bp, Stenotrophomonas maltophilia
atgactgccatcagcttcgagttctatccgcccaagaccgacgaacagcgcagccagctggaccgcgccgcggccaggctgaaggactacagccccgagtacgtgtcctgtaccttcggtgccggtggctcgaccctcagctacacctccgagaccgtgcgccacctcaaccagcaccacggcttcgaggcggcaccgcatctgtcctgtgtcggcggcacccgccagaaaatccgcgaactgctcaagctgtaccgcgccatcggctgccatcgcctggtcgcgctgcgtggcgacctgccctccggcatgggcttccccggcgacatgcgctatgccgccgagctgatcgagttcatccgcgccgaacacggcgatgccttccgcatcgaggtcggtgcctacccggagacccacccacaggcctccgatgcactggccgacctgaagcacttcaaggccaagatcgatgccggcgccgacgcggcgatcacccagtatttctacaacccggatgcgtacttccatttcgtcgatgccgtgcgccggctcggcgttcaggtgccgatcacgcccggcatcatgccgatcgccaacctcagccagctgcgccgcttttccgaacagtgcggtgcggaaattccgcgctggatcagccgcaagatgcaggcctatggcgatgacgccgaatcggtgcgcgcgttcggtaccgaagtggtggccaggctgtgccaacgcctggtcgagggcggcgcgccgggcctgcacttctacaccttgaacctggccaagccgaccacgtcggtgttgcagctgctgcacggctga

SEQ ID NO: 536523 - DNA, 585 bp, Stenotrophomonas maltophilia; identical to SEQ ID NO: 508030

SEQ ID NO: 536524 - DNA, 954 bp, Stenotrophomonas maltophilia; identical to SEQ ID NO: 508031

SEQ ID NO: 536525 - DNA, 2733 bp, Stenotrophomonas maltophilia; identical to SEQ ID NO: 508032

SEQ ID NO: 536526 - DNA, 957 bp, Stenotrophomonas maltophilia; identical to SEQ ID NO: 508033

SEQ ID NO: 536527 - DNA, 450 bp, Stenotrophomonas maltophilia; identical to SEQ ID NO: 508034

SEQ ID NO: 536528 - DNA, 912 bp, Stenotrophomonas maltophilia; identical to SEQ ID NO: 508035

SEQ ID NO: 536529 - DNA, 1242 bp, Stenotrophomonas maltophilia; identical to SEQ ID NO: 508036

SEQ ID NO: 536530 - DNA, 1236 bp, Stenotrophomonas maltophilia; identical to SEQ ID NO: 508037

SEQ ID NO: 536531 - DNA, 750 bp, Stenotrophomonas maltophilia; identical to SEQ ID NO: 508038

SEQ ID NO: 536532 - DNA, 963 bp, Stenotrophomonas maltophilia; identical to SEQ ID NO: 508039

SEQ ID NO: 536533 - DNA, 1437 bp, Stenotrophomonas maltophilia; identical to SEQ ID NO: 508040

SEQ ID NO: 536534 - DNA, 1089 bp, Stenotrophomonas maltophilia
atgagcgcggccaccgatagcgtgcgtccggtgatgatcctcgccggtggcaccggcggccacatcttccccggcctggccgtggcccgcgtgctgctcgggcgtggcgtgccggtgacctggatgggtgccgaaggcgcgatggaaacgcgcctggtgccgcagcacgacattgccatcgatacgctggccatcaccggcctgcgcggcaagggcaagctggccctgctggcggcaccgtggcggctgatgcgtgcactgcgcgcggccgggctgatcatccgcaagcgccagccgcgcgcggtggtcgcctttggtggctttgcctccggtcccggcggcatggccacgcgcctgcatggcctgccgctgatcgtgcatgagcagaaccgtgcgccgggcctgaccaaccgcatcctgtcgcgctatgcgcgccgcctgctgaccggtttcccgggcaccttcgcccagcgcgaggaattcgtcggcaacccggtgcgtgcggaaatcgccgccattgcgccgccggagcagcgcttcgccgaccgccacggcccgctgcgcgtgctggtggtcgggggcagccagggcgcgcgtgcgctcaacaccggcgtgccgcaggcgatcgccgcgctgggcgccgacgtgccggtgcaggtgcgccaccagagcggcgagaagatgcatgccgaagcggtcgaggcgtatgccaaggccggcgtgcaggctgagatcaccccgttcatcgcggacatggccgaggccttcgcctgggctgacctggtcgtctgccgcgccggcgcgtcgaccctggccgagctgtgcgcggtcggtgtcggcagcgtgctggtgccattccccgctgccgtcgacgatcaccagacccgcaacgcggagtacctggtcgagcgcggcgcggcggtgttgctgaagcaggacggaacgctggccgacggcatcgccgcactgctgcgcgatctgtccgaaaatcccgcccgccgcatgcagatggcgcaagccgcgcgtgccctggccaaggtcgatgccgccgagcgcatcgccgatatcattctcgaggaagctgtatga

SEQ ID NO: 536535 - DNA, 1326 bp, Stenotrophomonas maltophilia; identical to SEQ ID NO: 508042

SEQ ID NO: 536536 - DNA, 1086 bp, Stenotrophomonas maltophilia; identical to SEQ ID NO: 508043

SEQ ID NO: 536537 - DNA, 1395 bp, Stenotrophomonas maltophilia; identical to SEQ ID NO: 508044

SEQ ID NO: 536538 - DNA, 1509 bp, Stenotrophomonas maltophilia; identical to SEQ ID NO: 508045

SEQ ID NO: 536539 - DNA, 1845 bp, Stenotrophomonas maltophilia; identical to SEQ ID NO: 508046

SEQ ID NO: 536540 - DNA, 264 bp, Stenotrophomonas maltophilia; identical to SEQ ID NO: 508047

SEQ ID NO: 536541 - DNA, 969 bp, Stenotrophomonas maltophilia; identical to SEQ ID NO: 508048

SEQ ID NO: 536542 - DNA, 447 bp, Stenotrophomonas maltophilia
gtgttccagggcgagacggccatcacagttgacgacaaggggcgcatggcggttcccaccgcttaccgtgacctcgtcgcgcgcgccagcaacaaccgtctcgtgctgacctacaacccgttcgaagccggctgcctgtggctgtacgcagagtcggaatgggagcgggtccgcgacgatgtgatgtccaagcccaacacccagcgcgtcgtgcgcctgttgcagcagaagctggtcggctcggccgcccatctggaactggacggcaacggtcgcatcagcatccccgccagccaccgcggtgcggtgggcattgagaagaaggcggtattgctcggcatgggcgacaagttcgaattgtggagcgagcaggcgcatcgggccctgatccagcagacgttgtctgacgaggatctgggtgatgggttgctcgacctgaagttgtga

SEQ ID NO: 536543 - DNA, 789 bp, Stenotrophomonas maltophilia; identical to SEQ ID NO: 508050

SEQ ID NO: 536544 - DNA, 282 bp, Stenotrophomonas maltophilia; identical to SEQ ID NO: 536457

SEQ ID NO: 536545 - DNA, 282 bp, Stenotrophomonas maltophilia; identical to SEQ ID NO: 536457

SEQ ID NO: 536546 - DNA, 156 bp, Stenotrophomonas maltophilia
atgatcgtgatgctgggcaagtggccgatgctgggcgggcgcactcggaagtcgtcaggacgggagctactccactgcaacgtcccggtgctcttggtgatccggaagggctgcgtctggaccggccagcctttcgtagacatccggttgccataa

SEQ ID NO: 536547 - DNA, 225 bp, Stenotrophomonas maltophilia; identical to SEQ ID NO: 536441

SEQ ID NO: 536548 - DNA, 174 bp, Stenotrophomonas maltophilia
atgcgtgttcaactaatgaccgccgtagcggtctgcctcaccgtttcagcctgttcgggcagcaaggccccggatatctcgctggattccaagctcaaatgcagcatgattgctgaggcgaagatgcagggcgacaacgggaccgtgattcgcctagttgtgatctcccagtag

SEQ ID NO: 536549 - DNA, 444 bp, Stenotrophomonas maltophilia
atgagaaaaattgtagagaatgaaatcagttacacctttattgaagaggtgctgttcttgacgctgcgcggcgaccgcaagaaattgaagcgagagtatcgaattgccaaagatatggcttgttccgcgattaaggagtttgaatccggagagtcgttggtatgcgtgtcctggtttgaaagtgaagagcttcgcggtctgccgtttgacgattttctggtcggagagaagcgccagggggacaaaaacacactcttcgtccaatgcgaagggaaaaaggtatgggcagaagggacggaagaagtcattcttttcatcctcttccaaaaatgtaagcggtcgcccagcttctcgcaatacgaaaggaggatcagaagtgtgatgttcgccaaaaccagctcgaagaatcccggattttcagttatcgcagaatggttgaaatga

SEQ ID NO: 536550 - DNA, 483 bp, Stenotrophomonas maltophilia
atgagagacattaccaaacgccccaaacccccaatcctggctgaaatcaaacgccgcctatccgtctgtctgccgcttgctctccttcgaatcttgaacgaagaacagacgcgagtcgaaattgctgtccaagacgcgcttagacaactcgatacaaatcctgggctggcatctgttcaactggatagctccgagcgctttgctatcaggcaagagccagtcgtcatcagcaaggaatgcgcaggtatctacttcgttcgcgatgcgtgctctgtctatgctgacaagacgcgcgtgtcttgcgttgaagacatcgttctttacctgatgttctccaagctgcgcctctatgcgccggatttagcggcagacattcggatgtttgagcggaaaaggctgacgaagcaagagtatacggtgctcgaaaaacgccaaagacaactggaaaccgaattgcgctatatccgccaacgcttggcataa

SEQ ID NO: 536551 - DNA, 453 bp, Stenotrophomonas maltophilia
atgaataaatcaattggagatgagtctgagcaaatcacgtgtcgtgaggcgacctatgaaagtgtccggaatacaggttgcccttatttcccatactttggtgaaagcaaacaccaatttacggaagcagcctcctcgctcttacgagagctgtgtgacgagtatcgagtcggaagctggtcatgcatggagctgtcaaacggagcctggtatgtgtatccgctggactgcgaaaccatgttcttaaaagacggcgatggcggactgcatctgatgagcgcagacggagcaggactggctgtgacagcgtatctggtcaatcaactgagctggatgtgtcacgaagacggacaggctgaggaaagcatggcggcgtccgatcacttccataacttgcgggagttctatttcgaacatcccgatgcagctgcaatttttaatgtcgttgactaa

SEQ ID NO: 536552 - DNA, 804 bp, Stenotrophomonas maltophilia
atgttcgggatgttcaaaaagaaaacggaagttcagcaggccatcgacagcatggggttcgaagctgcgagccaacactacgcaagcatcattcgttcaaccattcccacgctcgcggttctccaacagttctactgggaagagctcgacgctgctagccagggcaatgcggcagcgaaagaatttgtccgcaaaagcggggtgtcggaagagaagtataaaggcgcattggatcgctccaatcctgctgtcgatggtccgaacgggcctcagcaactccttctcaggacttgcatgcagctattcgacaacgaagacttgatggttcgattccgcttgcggcttgtagaaatcctgatcgaaggctcggggttgaacgtgagaacagaagacttcccacttaataacgagtctgactttgaacgactcgtgcaagctgccgggcaagcttttgctggtcaggagcttcgtaagcgggccttccaaggcaatacgtttgcccaaatcacgttgtctcaattggcgattcaggtcattaatgagggccacgtcaacgaacgctacctgaaagagcgatttgagttcactcaaatggcggctgagtcaggccacgccatctctcagttcaatctagcaagcatgttcgatcagatgattgatccatcaacacccatcacagaagacgacattaaaaatctgaacttcgcactgcattggttccgcaaagccgctgaaaacgggatcgcgggtgctcagcaaccgattgagaacatcgaaagattcttggcatctcttgaccaatag

SEQ ID NO: 536553 - DNA, 576 bp, Stenotrophomonas maltophilia
atgtttgctgagtggttcgacaagaagcttcccgagcttcgaaagggcgagttcgagacgaccgctgactacaagaagcgcgtccaggacgtagatacagccttagcgcctatggcgagcggtgatgtctacctattcccgccagactcgatttactccacctatgacgccgacaagcaagtcttccgtccaagcactttgcgctgctacgactggggcgataccggtaaccaggtgtgccagttggcacagttgcctgctgcaccaggagagtcgaggagcactcagttccacgccgtagtgcccacaaaatcggttcgccgctgggtccgagatggaggcttggaagtcagctacgcctgtcccgtgcccgctgctgaggctacggctttgaaaaatcgggtgcagtttgcttacggtttccgcttcacatctggcgaaccgttgatgcccaatgcgccgagcaccttggatgaccgtacctatttttacaattacggtttgaaggctgaacttgttctggcgctgtgctacgacacgagggacggaagggtaattagcaggacgatgttctga

SEQ ID NO: 536554 - DNA, 375 bp, Stenotrophomonas maltophilia
atgaacctgcacgatatggcaattcggttgattgagaaggtcacctgggaaacagtccagggaaaactcaaatggcggtttagcagtgccccgagtcaactcacagatggtaaggatgacaagattgaggtctatcttcaaaccaagttcaagggtcagccgctagcgctgttcgaacggcggtataaatactatgcggatattgatgagtggtcatggacgttccgaagagttttcgcaatcctggatggtgctggccgagtgatctatgaatcaagcgattctagtttggaaataaataatctttacgatttggcgttcaataacgctggtgatgttgagaacgttatgaacatgctcctgtccgatgactaa

SEQ ID NO: 536555 - DNA, 450 bp, Stenotrophomonas maltophilia
atggtgttctgtaagcacgttgttctgactctccttttcagcgcttccttttccgcctgggccgactcgctcgaaccgctgtcctgcggagcagtggcagcgggtgccagggagagtgatgaaaagaacatcaagagatttgcgactgaggttccgaagactgctgccaagttcctcgctgacaacattcggaaagagttgaaggcgcaaggtgcggatgatttcaatgcactgagcgtatctcttgattactacgctgagaccgctctacctatcgctcaggaagtcacttctaaattcgctttgattgcccgccaagaaggttcctatgtcaacggcatcaagcggtattgcaaagacaagaccagctccgtcggtaatttctttcatctggcattcgatgcagctttggacgagaagttaaaggaagctgcgaagtcagtgaattaa

SEQ ID NO: 536556 - DNA, 225 bp, Stenotrophomonas maltophilia; identical to SEQ ID NO: 536441

SEQ ID NO: 536557 - DNA, 441 bp, Stenotrophomonas maltophilia
atgaactacgcatacctacttcttccagcggtgcagacgaagaaattggacgttgtgaaagcagctattggaaccgccgtgttccaccagcccaagcacgacttcatcaacgacgccgattcgcgcgggatcacagctttggcactcgcaagcattttttgggcccaggagtcgaatcccaaggcacgcgaagagctggacgcgattgcggcgttcctcctcgacttcaaagcgaacccgtttcaagaagttggcgtaaccctggtgaagaggtatcacgcgtggagcggacggaaagagttcgaaagacgacccggcaagaccatcgcagaaatctgtaacgggagaattccgccatctttgagagcttttatccagtccgacgcagagcgaatgcctgtccctgggaagcgcattgaagagcaaaaggaggccgcgtga

SEQ ID NO: 536558 - DNA, 516 bp, Stenotrophomonas maltophilia
atgaaaaaaatgaaagacctgtctgccgcacttggcgtcgtgcatcagagcagacacgacgcagtgatgcacgagagcctggaagacgtgttgccagaagataagctgggagtaggggacgagccagggcggaagacctatttccagttcagtgaagagtcggtgtctcgcagaaacgcacaaacagggatgccgattcatttgagtctcggcgttccgggtgacttagacactaagccctctcttcacgactaccgaacagaccagggcaagcgggcgaatcgaatgatgatgaccgtgccgccaaaattaagggaacagctccgaaagctctcgggcgctgagttcgactatgaggtgcctattgctacctctatcattgctttggcttcttacgccgcccagcgactcgtggatgaacgtaagtgcttgacggtaaaggcttgggaggacgaaaggaaaagccagcggcagctgtatagaagggtggtgaagaagcgaaatgggcgaaattaa

SEQ ID NO: 536559 - DNA, 687 bp, Stenotrophomonas maltophilia
atgaaacacgtattctgtatatgttttctcgctgcttgtctcgcagcaccttctgttgcactagcgcaaaaaggagctggcaattcaaaaatcaacgaggagtctgccagtgcctttgcagtgtcctacgggtcctacgcgagccagtcggacgcggaggtcgtgatggcttttgtgaagaggtcccagattcccagttttagcgagagaaccgttgttaatggtcaatcggcgtggcgagttcgcttgggacctttttcgacgtgggagcaagcggaaaaggcaaaagcaacggggatgactctgcgtggcgacgttaacgcgcaaatccttacactaggttccacaggcagtcagccttcaagcgccttgccctccaagatcaaaattacggcctcagaattatttcgggcttattcagaaaatgaagttaggggagaccagcaatacaaacatagacaaatgctagtgacgggtcaaatacgttccattcgagccggaattggcggtgaaccccttgtcgttcttgtgggaggcggtcgctttgaggatgtgtatgctcgggatatccccgccgcccaggcggagcggttaaatagggatcaaatagttatcgtgcaatgccagggctttggagtaattgcggcgactccgcagcttagaggctgcatcttatattccttatga

SEQ ID NO: 536560 - DNA, 387 bp, Stenotrophomonas maltophilia
atgagcgcgattgcacaacaagtatcttcaaggtattacatcagcgaaagaaaaatcatcagcgatttgcacgtcctcttcaatgcgtcagtagcggggggcgcacgagtttcagacaaggcagtggtatacagcgcggaagccttcgcagacttcttcgactttcgaaaatttggcgacatgcaccaagcgatttacagccaagaattagaaggggtgcagattcacaagggcttgctaatgggcaaataccgcttcttctacgtctcccaagacagcagcgcggtctatggcttctactctgctcacgacaagttcttccaagaactcatgcgtgaggaaagagcgatgaacaaccactacttcctcgaagagcgtgccgcatga

SEQ ID NO: 536561 - DNA, 372 bp, Stenotrophomonas maltophilia
atgaccgctcttttccaagaaatgccaatccagcgcctgagttgctcgctccctagtgtccgactacacgccgacctggacgccgacctgagggcactggcagcgcttcaacagaagccattggttcaagtcatgcgcaacattctctatcactacttgcagatcgaggaggaactgatgcggttggaaatcgaagatgctcccgttcgaagctcaactaaggcggaacaagtgatgagccagaaggtgagcgtgaccgaggaactcaaagacgcttttgttcaacgtgcccaagctctctatcttccccaaacgacgatgctgcggatgatcttagaggcaggggttgagcggtggaagcgagccctgtaa

SEQ ID NO: 536562 - DNA, 1038 bp, Stenotrophomonas maltophilia
atgcgtattcaattggtaactgctatggcggtctgtctcagcatttcggcttgctcagacagcaaggccccggatatctcactcgattcgaagctcaaatgtgagcaactggctgcaagtcagtccatgggtgatgacttggccgtaaatcgtcagataaacatggccttccaagctgccactgcgagttacactggtaactcggatatcgagtattacttccagaatgttctgaaaggacgctctcaacctcgcagtgaggtcaaccaggacatccttgctcaatgcatggcggatacaggaagctccattgcggatgtattccgtaaagccgtgaagtccaactatgaccgccatggaaaagatgtcggactcgcaagttgcaaagcatccacagaagggctgcttgcgccagacgctgtgacaggttatctctcgaaagtcattgaggcacggcgagctgcgtccgttgttggatttattttcaaaccgaatgcggaagacattgagcagtatcgtcaacaggtagaagcaacttgcactgcttcgcctaatcttctcgtgtctcgtgtcgcagtgagtgtgattgaggaaaagattggcgaagcgcagagagcgcagactgaaaaagagcgccaggagcgggatgatcgtgatacggcgactctctcatctctggctcagctcaacgcagttctggatgcatctcagcctgttccgtgccagctcttggcagaggttcaaagcggaagaaactaccgcacaggcgatgatgtagataaagctgtcgagcgagcaatgagcgctgttcgtctcaaatcctcacctgcatacgcagccgtgtttaacggtcagtatttcgacattggtgagtgcgctaagcaaggcctcagtctcgaagatggcattcacgcaaaatacggtccggacaccgtggaaaatacgaaggaattgtatttcggagatgagattcggatgaggatggctagtgacggcgagatccagcttcgtaagcagatctacggtgattcgcgctga

SEQ ID NO: 536563 - DNA, 870 bp, Stenotrophomonas maltophilia
atgaatcagtgcatcgcggatacaggggcatcaatctctgcgaccttccgtgatgcgttgtctgagagctacgaacgaaatggcgagaagctcttctttgcgagctgtaaggctttcaacaaaggcgtcattgactcgcagaaaattaaggaagagttcaagaaagctgagacttttagggcgactgctcgcggctcgcaagccatgggcgttgatcttgacgcagaatcggacagctatatcgcaaagataaaggcatcgtgcgagtcaaatccgtcccagcgattgcagaccttgaccaatgatgcgatcaatcaacaggacgaagcggagcgagcagcgaaggcagcagaccaagcttcggcgcgagctgcttacttggtagagaccgtcaaactggttggggagcttgatgcagcaatccaggctcagcgccccatctcttgctccatcctgaatcgcgtgaacacggaccggcatgaagagattcgcgagaaagccgtgaatacgatacagcacgcagtagaggcaacactcgcaaggcattcccttgaatatgccgctgccgctcgtgcagatttcgacagttcaagtttagatttcgaggcctgcgccgctaacaactggacgttggatcaggaactggttgaaaggctaggggttgactcgatagagaacgcgcaaaagcgccttggcaattctttcatgtctgcggtgaacaacgagcgtgctatccgctcccaatcccaagggaacggcggcgatgttgcatcgtcagagagcgaagatatgcaaatggagcgcgcatctagggccgacatggaagatgcgctctaccaacagcgtcaagcccaggagcagtcgcactaa

SEQ ID NO: 536564 - DNA, 282 bp, Stenotrophomonas maltophilia; identical to SEQ ID NO: 536457

SEQ ID NO: 536565 - DNA, 282 bp, Stenotrophomonas maltophilia; identical to SEQ ID NO: 364321

SEQ ID NO: 536566 - DNA, 852 bp, Stenotrophomonas maltophilia
atgcgcgcgcacgcccgggagttccgcttggtggcgatgtgccgggtgcttggcgtgcagcgcagcggctactacgcctggctgcgccatggcgccagcgctcgtgagcgcgaagatcagcgtctgctggggctgatcaagcaccactggctggccagcggcacggtgtatggctatcgcaagatcaccctggacctgcgcgaggccggcgagcaatgcagtcggcaccgcgtcttgcggttgatgagggcagaaggtctgcgtgcccaagtcggctatggccgcaagccgcgtcatcgcggcggcccggcgggcgtggtggccaacgtgctcaaccgggacttcgggccacaggcaccgaacaaggtctgggtcacggacatcacctacatccggacctacgagggctggctgttcctggcggcggtgatggacctgtattcgcgccagatcgtgggttgggcaaccgcttcgacgatgaccagcgatctggtgctgcaggcactggtggcggcggcgtggcggcgcaagcccggtcctggcgtgatggtgcactccgaccagggctgtcagttcaccagcagcgattggcagtcgttcctgaaagcgcaccggatggtgccgagcatgagccgacgcgggaactgccacgacaacgccgtggccgagagtttcttcagcgtcttgaagaaggagcggatcaagcggcggatctacccgacacgcgccatggcggcatcggacgtgtttgactacatcgagatgttctacaacccgatccgccggcatggttccgctggcggactgtcaccggtagagtttgaaaggcgctacgcgcagagcggcgactga

SEQ ID NO: 536567 - DNA, 582 bp, Stenotrophomonas maltophilia
atgggaaacgttatcgggcatctgttgcgcttgccgctggacttcttcgagaagcgacacctgggtgatatcacctccagggtttcctcggtgcagtccatccagaagacgttgaccaccagtttcgtcgaggcgctcatcgacggcctgatggcgatcgttacgctcggggtgatggttctctacagctggaagctggcgctggtgacgctggcggcagtggtgctgtacacccttgtccgcgtcaccgcgtacacgccagttcgcgatcgtaccgaacgccagctcgttgccagcgcaaagcaacaatcgcatctgctcgagtcgatccgcggcatgcagagcatcaaggtcgccggccaggagtcgatgcggacggcaacctacgagaacctgatggtcagtacggtcaatgaggaagtcaggcttttgaagctgacgctcgggtttaccagtaccagtcagttgatcttcggcatcgagagaattgctgttatctggattggtgcaatgctggccatgaacaatggggttcacccccgttttcacggacacttacaagaaggccgatcgaggccatga

SEQ ID NO: 536568 - DNA, 129 bp, Stenotrophomonas maltophilia
atgctgctgcacgccgagcgcctgcgcttcccgcatcccgacggcggcgccgtggatgtcagtgcgccgctggaccgtgaattccagaaggcgctggacctgttcggctggcaggtggacaccgtttga

SEQ ID NO: 536569 - DNA, 159 bp, Stenotrophomonas maltophilia
atgcagggcgtgcatcgcatgctgctgcacgccgagcgcctgcgcttcccgcatcccgacggcggcgccgtggatgtcagtgcgccgctggaccgtgaattccagaaggcgctggacctgttcggctggcactacctcatttcttttccggttcgttga

SEQ ID NO: 536570 - DNA, 1188 bp, Stenotrophomonas maltophilia
gtgggaaatcgcggcgggacaagtccgcgaagacgaaaaccgctacggcacggccggcgtcagcgcgtcgtgggccaagggcgtcaacgaccgctggaccatccgagccggtggtcaggtggacgagaacggcaagggcaacgtcaccgtgggttccacctgggccccgggcacttggggcgttttcgatggcgaggtgggccgctcaagccaaggtggaacgcgctgggcggccagctacgactaccgcggccccaagctgggcgttcgattggaacacgaagagaacgaaggcttctggcgcctgcagagcacctacgccacacccattgcctcgcgcacccaagcctccgtgttctaccgcccggatcgccgcttcactgtgcgtggcatctacagtgccatcgacacggggcgctccagcctggccttcgcttccttgggcgtgagcgcgaacctgggcactgcaggccaggtgtccgccaacgtgctccgagacctccaaggcgacgatcttcaagtgtccgccagctacacctaccgcttcggcagcaaggccagcgtgggcgttcgggcccgccaggccccaggccaggatgccctgaccacccgagcgacctaccgcaccgagggcggccttcgcttggcggcagagcacaccgagggcgatcagggcagcacccgggccacggcggatgccatgacgcgttacggcgacgcccggatcatggtggaccactacgacgggcaaacccaggtggcggccaacttctccggcgccgtgttcctggaccaccgcggcgtggccttcgggcgacccgcctacgccagcttcgccgtggtggatgtgccgggccaggcgggcttgccggtgcgggtcaacggagcgccggtcggccagaccaacaagcaaggccgcgtgttggtgaccgacgttccctccctgctacccaccaccgtcagcctcaaggacaaggagctgccggtgggcgtggagatcggggagaccgaaaagcaatccgtggcgccccgccaaggcggtgtgcgggtgaccttccccgtgctgacgcagaacgcccgggccttcatcctgacaggtccgatcatcgcgccgggcaccgtcgcgtccacgccgaacgaacaagccatggtcggctacgacggagccctttacctagaacaccctga

SEQ ID NO: 536571 - DNA, 783 bp, Stenotrophomonas maltophilia
atgtctacgccacgccccgcatcggccccgtggcgctgggcggcattcgcctcgcgaaggacccggcagcgctggatccgctcacgccgacgtggcccgtcccgaccttggggggcatcgcgctggatccggggcaggtcaaggtcctgtccaaccaagccgaaatcacgcgccaggacgtcaaggtcggccccttcaccgtggacggtcgaaacgtggccctgggagccagccaaacggccgtggtcgtgcgcgacgcctacggcagggaaaccgccgtttccactgcacgcctctacgtcgccccaaccctgctgcgccccgggctctccgcgtgggaaatcgccgccggccaggtccgcgaagacgaaaaccgctacggcacggccggcgtcagcgcttcctgggccaagggcgtcaacgaccgctggaccatccgagccggtggccagctggacgagaacggcaagggcaatgtcaccgtgggttccacctgggccccgggcacctggggcgtgctcgacggcgaggtgggtcactcaagcgacggcgggacgcgctgggctgttgcctacggctacaaagggcccacgtttggcgtgcgattggaacacgaggaaaacgacgggttctggcgactgcagagcgagaccgcgctgcccatcgcgtcgcgcacccaagccagcgtttcctatcgcccagatcgccgcttcaccgtgcgcggcacctacagcgccatcgacacggggcgctccagcctggccttcgcttccctgggcgtga

SEQ ID NO: 536572 - DNA, 1002 bp, Stenotrophomonas maltophilia
ttggcccgaggaaaacgccggggagcggaactcgaacgtggcggctttgccgatccgatccttggccaacggcacgcccgagccttgattgacttgggccatcaagggcccgctaggcactgcggtcgcgggggaggcggacgcttggcctgggccgtaagtcactctgtagatgacgccgttggcatcgtcgccgaccaaaagtgcaccgcccttcgtcatcgccagaccgacgggccttgcgatatgcgcctggccgttgtcgaccaggaagccggtcaagaagggctcaaacccgaccggcttgccggcgttgaaacgaacccgcaccacctcgtagcccgacgcaggcttgcggttccaggaaccgcgcatcgtcacgaaggcgtccccccggtaagctgccgggaactgctggccggtgtagaacagcatctgcatgggggccgcgtgggctgtgtagccgagcaccattggctcacttgtcgccgcccattgctgtttgctgatctgccctggcggtgtgctctggggattcaccccgtccttgccccaaatgtggggccaaccatacttctttcctttctgaatgcggttgagctcctcgggctgctcatcgttgcccaagtagtcgatgccgtgatccatcccccacagctcccccgttttggagtcccaagcaaagccgatggtgttccgcaggccgctggcaaagatggaccggctcttgccatccggcgaggacctcagcagcgccgcatgctcgggattggtctcgttgcacgcgttacaggacgagcccacgctgatgtagagcatctcatcagggccaaaggccagcgtgcggttggggtgctggccgccatcgggcaggtcgttgatgatccgttcctctggacccaacgtgccgtccgggcgtatgggggcgcgatacacgtcgttggccgtggcgacatacagctgcccgttggcgatggccagcccgtgcgctcctggacgtga

SEQ ID NO: 536573 - DNA, 189 bp, Stenotrophomonas maltophilia; identical to SEQ ID NO: 514039

SEQ ID NO: 536574 - DNA, 612 bp, Stenotrophomonas maltophilia
atgcgcatgggctgctgccagcacctggctaccatgcatggtgtccagcgcttctccataggtcgccttgacgtggtccgccgccaaccgggcttgggcatcggggacctcaaaccgccggagcagttgggcgatgtccagaggcggctgagacggcaccggcagttcaggcaggactcggagggcgtggagctgcttcgctgcggaacggttcgactggacctggtcgatggattccctcagctctctcaacagcccctcccgctgctcggccgggagcaaggcgtaggcggaggccaggggtttgtggcccagcacgccgacatggatggctgcgtcgagcgggtgagcggacaggtccggatcgacctgaagcaatgcggcgtggccgccctgccccagctccagggaaatgcggttggagaaacggctgggggtcatcacccagtcaaaacccgcgtcggtctgggtgtccaacccggaaacctgggcctctcggcaaaaccgcgtggccaagtccaacacttcgcgcgcatcggcgcccgcggcggcctcgtgatgcttcccgtagaactgggccagcgtcagggggtggagaatgggatgaagtaa

SEQ ID NO: 536575 - DNA, 231 bp, Stenotrophomonas maltophilia
atggatcctccgggtctccttggtccatttgacttctccagttccaagcacgagctcccacccgccgaccttggccagtgcattggtgcgctccagaaagacctggcttctctgaaaacgccgttgcaaagcctgggactcggtgacccgctcaagaaggcgagcgcgctgctgcatgccgactgcggcggcctgggccaagcaggacaaggctgctccctgctccgctga

SEQ ID NO: 536576 - DNA, 585 bp, Stenotrophomonas maltophilia
atgcgtctcgtcgtctgttgtttcaaagggggcgttggcaaaacgacgctttcgctcaatcttgctgcgctcttcgcctcccaacaccgagttttggtgaacgaccgagatccgcactgctgttctgttgcctgggccgcgctttccgacgaaaccccattcaccgtgggccgttcggcctcccccgggttcgacttggaaatccaagacctgccgcccagcgccccagtgaaagatcagcttccggatggcgacctctacatcgttcccactctgctcgacggcgggagttacgtcgtctacctgcataccatcgagaccctccggaagcagggcaaggccttcctaccggtggccaaccgggtcaacatcaagcgggctgaacaccgccggcggctggaagacccggagctggccggggccatcgtcatccccgagcgcgctgcgctgggaagcttctatgagctgggggagaccgtcttttccatgcgcggcgcgggcgtggctaacgcccgagaagatatattgcgggtaggtcaggctatccaaaaaagattggccaacccgggccgggggaatgcatga

SEQ ID NO: 536577 - DNA, 471 bp, Stenotrophomonas maltophilia
atgagcgccgggaccgaaagcctcatcagggccatccaaaccaacgacccactggcgttttatgggtggctgcacacactcaagggaacgcccgacctggacgctggcgtggccggcgatcccggcatcactgcgttggccgtcgcgagcgtcatgtattccaaggccatccggtctgaccggatcctggcggcgcgctatgccgccatggtcgaagcgctcatggacgccggagccaacccgctggtccggattggggagcgtttcgtcgtgcgacgggggcacaccgggaagctggagcggcgacgggtggacgaaggccgaacgctggccgaggtctgcgggggcgttctttgcccggccatgcaggcatggttcgcacgccataccgcggatttgatgaacacccaccttcaccgctaccacccagcgttcatcaagattcagcaaccggtcgctgaaaaggtttga

SEQ ID NO: 536578 - DNA, 246 bp, Stenotrophomonas maltophilia
atgagcctcttgaacatggccctgctgtttgtcggtctcctgggcaccacggtgttctaccaggacctggtcgccaaccccatcaccgctgggcgcgccctcgtgcgcttctatcaactgccggcggagcatcgccaaggaagcgtgctgcaagaggtttccaaggcatggtggagcatcgtgctggtgccgttctacgtgctggtggccctcgtgctcatcggggttctgggaggtgggcaatga

SEQ ID NO: 536579 - DNA, 1092 bp, Stenotrophomonas maltophilia
atggagcatctgcgccatgctcacgctggacatgccgctttccgcctccagcttctcggccgcggcgttggaaacgcagacgcccagcaactcgaatccttgggtttcgtaagctgcccgaaaacactcactgatcgtcgttttaccggttccggcgagcccagaaagattgaccacgcccccgctgccctgggtgatgtggtccaacgcgtggcgctgctcctgggagagttgaaagcccttggccttctcgtagtctttcaccactcggtccacgtcggcctgaggcacgtggtgatgggtttccttggctcggtcaatcgcgaaggccaccacctcctgctcgatctggagtatccacggggcgcagtagcgctcctgggtatgccgccttgccagcgagtcgcccttgtcgtcgtcgtgcaggcgcatggggttgaccagcaccaggccgtgctccttcttgaacgcttcaaccaagccgtagagctctggcacggtcacgctgccggcgtattcctggcccaagacctccaagaggttgtggtcgcagaagatggcgtcggtctcatggagccgctccagcagttctgccggggatttttgctccatttcgtgcgcgttgcccttggcctgcttcaggctttccgtggatacgtcgaagcctttcagcgtgtcctgccagtgcgcgatgagctcctggtaaggcggctcgtccttgtctttgcgcgtggccaacgtagcctgctgattagacacgttgtgcttggccgcgtaagcgaggatttccttgcggcggttgccatagcgatccgtcacctcctcgtccaggcccgcgatccgcgcgtagacgcgcccggtttcctggccgtcgtcgtccagttcacggatgcggtccaccccatagcccagcgccttcatgccctggtagagctcggtcttgtagacctcatccatggctttgcggtagcggtagatttcttcagcagagaggctggcctctttgccgtcgttgcccaaggaaaggttgtagagcaggttgtgggtgtggaggttcgggcccatctccccggtcgcttcgtcggctcgtga

SEQ ID NO: 536580 - DNA, 327 bp, Stenotrophomonas maltophilia
atggctgctccagatcaacccatccaccccaatgacgtctttcccggccttgttgcgccgggtttcggacatggcttcgaaggcttccatcgcccgctggaccgcgttgcggtgcgcggcatgaatggcctcttgctctgccggatcggacgccagtgcaaacgccacggagatatccagcggtgcgctgattgtcaggtcaaagccgatgcgatgcccaccggccagatacgtgaccaccttgccgtctttgtcgcgcaacggggccttgccggtcttatcaaagcggactttgacctgtccgcgatccccggctccgtggcatag

SEQ ID NO: 536581 - DNA, 2022 bp, Stenotrophomonas maltophilia
atgtggcggcccaacacaaacgcgcgcagtgctgcctggagctcatggccgcaggcgcggaccctgggcagttggatcgtgaggggcgcaagccgggcgacgctcaccgggagaaggcacgtgagcaagtccacggtctatgactgctggagctggacggttccgtcgagtattgaaccgagccgcgaggtgcgttattggccccaggcgttgctctccggttcggtcatcgcagccctgacgtatccggccgcgctctggctgggttggaaaatcccatcctcacactcgctgatgaacttcggtcaggcactgactggcagcctggcagcgctgggcaaccttgccaccggcacgatctcattccgagagcctgccgccgcgttctgggaggtggccaaggagcaggccacgtttggcacgttgtcacgggtcggcgttgcggcgggcttggcagggtgggtgtcggcgtgggtgacccgacgggggttaatccctcgagccaaccagtggcacgtttcgggagctcaactgcttgaaggcaaggaagcggttgccgaagcccgtcgccgttctctcagtccaaaggagtctcgctcagagacgcacgcagtctccatccacccggaatggatgcgatcaaagaaggactgggcccagcacatgttcatttggggcggaacaggccaaggcaagtccgtcattctcaagcacatcctcgctcaggtcgtcggtaagaacaaaaaggcgttcatctacgacatcaagggggatttcacggccatattccggcgcccggtgatcgtctgcccgtttgataggcggagctacgtctgggacgtggggcaagatgtcgcaacgcagacacaagcctcagcatttgcacagtcgatcatcccgccggaaagcggagccggtgcgttctgggccactgccgctcagaccctgttagaggggtgtgtccgcgaactgcaggccacccggcgacgggattggggctgggcggacctggctgcgttgctcgccaggccggccaagtccatgttcgaggccatgtccgtttacttccctcgcgcagcgatgctgatcgcgtctgaggactccaacacgaccggcagtgtcctcgcctgcctggccaacggcaccgccgtgattgatcgcttggcgactgcgtggccaaggcgagacccgaagcggagcttctcaatggtggcgtggatccaagacggatacaaaggacgcaaacagctgatagtgcaatcagggccggatccattgctcgcacgcgcgtatatcagcgcgatggtcaacatcgctgttccggaaatcctggcattgaaagacgatgagcgaggtcgtcacctgggcttctacttcgacgaactgaccacggccggaaaactgaacattgaaccgctgatcgcagtgggcagaagcaagggcgtctcgctggtcgcctgcgtgcaggacttgagtcagatccaagacgtctacggagacaaggccgcccaagcgttcgagtcgatgatcggcaccgtggtctgctgcaagaccgccggggcaacagcgatcgagctggccggcaagattggcaaacgaaccgtggcttggcgcacgcatgacaagaacgccacgctccacgaggagtcgagggccgtagtttcccccggccggctgatcgatgatctagggcccaggaagggaaagcaatacggccctgaagggtggggcatccgggccatcgtccagaccaccggtgacttgctcctgctggactggcctggcgtgagttatccgaaggttcgagagggacagaagcgggcgaaatggacgaagcagggcgctcgcccggtggagcaaaagcccatgccaccgtgtgacgcgcagagcgccgcagaggtccagcgggtctcgaagatgaccgccgaccaggccgccgcggagctgcaaaaacgcggtgccacgccgccgaagctccgcgccgtttcagacgacgagctggaagccatcttccgcaagtag

SEQ ID NO: 536582 - DNA, 630 bp, Stenotrophomonas maltophilia
gtgttcgtcgccacggtgttcaatgccagccagatcgacggcatgccggagcccccgccgcccttcgtcatgcccgagtcgatccgtaacttgcgtgtgcgggagctgctggaccgtcaccagccgaaggttcaccacgacggtggcaaccgggcgttctatagcgtcgctgccgattcaatccacctgccgaagcaccacactttcagagatgacgtcagctatcaggccacgctgctccacgaactggcccattggactggagcgaagcaccgcctcgaccgagaccagaccgggcgattcggcagccaggactacgccaaagaggagctggttgcagagctgtccagtttgttcatttccgagcgcctgggcattggcttaggcaggcaacacgaagagcagcatgcgggctacctgcagagctggatgagggcgcttgaagacgacgcgaaatgcctgttccgcgcggccagccaagccgagaaggtcatgaccttcctcgacattcccgcgttcgagcgcgaaccgctgccgcaggtcaagaaggagcagggcatggaccagaggcggaaggcggaagccgaccgaaggtccccatcgcgacgcaaggagcgccaggttgcttag

SEQ ID NO: 536583 - DNA, 630 bp, Stenotrophomonas maltophilia
gtgttcgtcgccacggtgttcaatgccagccaaatggacggcatgcccgagcccccgccgcccttcgtcatgcccgagtcgatccgcaacttgcgtgtgcgggagttgttggacaagcaccagccaaaacttcatcacgacggtggcaaccgagcgttctactccgtcgccgcggattcgattcacctgccgaagcaccacactttccaagatgacgtcagctaccaggccacgttgctccatgagctggcccactggaccggcgccaagcaccggctcgaccgcgaccaggccggtcggttcggcagccaggactacgcaaaagaggaactggtggcagagctgtccagccttttcatttccgagcgcctggggattgccccgggcaaggggcacgaagagcagcacgccgcctacctgcagtcctggatgaaggccctcgccgacgaccccaggaccttgttccgcgcggcaagctctgcagagaaggtcatgacctttttggacatcccggcgtttgaacgcgagccgctgccccaggtcaagaaggagcagggcatggagcaggggcgaaaggcggaagccggccgaaggtctccatcgcgacgcaaggaacgccaggttgcttaa

SEQ ID NO: 536584 - DNA, 243 bp, Stenotrophomonas maltophilia
gtgactgccccggtggaagagaaggccgcggtcgctgccccggttgtggaagccccggtgctggcagagccacctaaggcccagaccccggcaactgccccggcgtcaaagccggtgccggtttcgaaaccagctgcaaagcccaagccggcccccaagcctgttgctaaacccgagccgaaaaacgattggcaggaccaagccaacagcgatatcgacgcgtgggcagaaaagatcaggtga

SEQ ID NO: 536585 - DNA, 570 bp, Stenotrophomonas maltophilia; identical to SEQ ID NO: 501397

SEQ ID NO: 536586 - DNA, 495 bp, Stenotrophomonas maltophilia
atgaaccgctatccgccgcagcaagttgtgtatgcgccgccgggcccatccgcgctgatcctccctagcgtcatcttgggcccgttgggcctggttgggctggcggccggcctggaggtgatgaagcgcgacttcttcattggcctggtctgttgtgtgcccggtgcgctcgtcttcgcgttcttggcgttttgcctggcgctccacatccgggctcagcagctctgggactggcacgtccgcacggggcggatgccgtattttcggaagcacggcttcctgaaaggggcgctgctcgggggcggattgggcgtggtgacggtggtggcggccgccgttctggggttcaagtatgcggagcatccccagtttggggagatcgctaccgcagcgttttacttggtttggctctggggcgtgctgttgatcggcgtgctggccgtagtgttcgggtgggtcaagcgggcgtgggatagaacggccctccccagatga

SEQ ID NO: 536587 - DNA, 243 bp, Stenotrophomonas maltophilia
gtgactgccccggtggaagagaaggccgcggtcgctgccccggttgtggaagccccggtgctggcagagccacctaaggcccagaccccggcaactgccccggcgtcaaagccggtgccggtttcgaaaccggctgcaaagcccaagccggcccccaagcctgttgccaaacccgagccgaaaaacgattggcaggaccaagccaacagcgatatcgacgcgtgggcagaaaagatcaggtga

SEQ ID NO: 536588 - DNA, 228 bp, Stenotrophomonas maltophilia
atgctgcagggggcgaacagccgaggatcggtgggctatttcggccccaaaccgcctgtgggcgatccaccgcaccattaccacttccagctgttggccttggacaccgtgcttgatctgaaggccggcgcgacgcgggacgaagtgctaaaggccgcgaagggccacattctgggcatgagcaagactgtgggcacctaccagcaggtcgaggccccgctgaaataa

SEQ ID NO: 536589 - DNA, 228 bp, Stenotrophomonas maltophilia
atgctgcagggggtgaacagccgggggtctgtggggtatttcggccccaaaccgccagtgggcgatcgaccccaccattaccacttccagctgttggccttggacaccgtgcttgatatgaaggccggggcaacgcgggacgaggtgctgaaggccgcgaagggccacatcctaggcgtgagcgagaccgtgggcacctaccagcaggtcgaggccccgctgaaataa

SEQ ID NO: 536590 - DNA, 243 bp, Stenotrophomonas maltophilia
atgaagcccatcgattttgcgagcaaccgagagaccaaatcgttcttgaacaacgctgagaacgagctgcgagcccacaaccgatccaagctcttggacgagcttcttccagctgccaatgcttggaagccgccggaaggcgggtttgcggccgacgcccaacgccaggtcggtgcggccatgaaggcccacgggcaggacggccaagcccaggaagcccctcgcttgcgagcgcgcttctaa

SEQ ID NO: 536591 - DNA, 252 bp, Stenotrophomonas maltophilia
atgaatacccgcagccaaacccaagcgcccgcccggtcctccgtcgccaccacctcagcgctcctgcgattcctgttcgacgccatgtcggggatgggggcggccaagctgggatgggagatggtcaccgaccccaaggccaagctgtcggacatcgccctcggcgtgccgctttgcctggctcctccaacgattgcggccacctgggcgctttgcttgttcggcatcgcccaacaccaccaacttttttga

SEQ ID NO: 536592 - DNA, 513 bp, Stenotrophomonas maltophilia
atgaccatcacaaagagcgcctacaccccaacccaccgtcgcccgcccgcgctctatttcttcgccaagaacgaactgaacgtggcggcctttgacctgctgaactgggagggctcgcgcgagaggatcgtgtcggcctggaagctgatcagagctgaggtgctaacagtgcagagcgtggatgacgacgaagtcgcgcagctctacgacgccgtcgagaaggacgtgggagaagcgatcgcactacacgacatcgatggcgacgcgtccggcagcgacgaacgcgaagtgaacgagtggtacaaggcgtacgtagacctctcgagcaattacgggtggtacagctggcccgaactcgcactggccgactacctgcgcgggttcgagggctatgacgagccaagggcgaaggccaccgcgcagcgcgcgtgggaaacggcgcgcatggtctacgacgcccgcaagtcggcagaagagaagcccacgaagaaggcgaggaagaaggccgcctga

SEQ ID NO: 536593 - DNA, 2409 bp, Stenotrophomonas maltophilia
atggccgcacaagaaaacgcccacggcgtgctagaccgtgggcgcaaggttacaaccgaccgggagacggagcctgccagagctcacgggatcaatgatgccgtggggcgcagctcgccgacgccgtcattcgacgtcgatggtctgatccgcgcgggcctcacgctgatcccgctccacaggtgggacgccaaggacgcgaggggccgcgaccgcggcaagtcgccgcgcgacggcgcctggcaggccagggactacgacagccgcgaggtggtggagcaggcgcgccgcgatggcaggaacgtgggcgtgcgcctgccgccgacgtggatggtgctcgacgtggacccgcgcaacttcggaggaaaggacgaccccgacaacgccgccggacgcgacccgctggccgagctggtgcgggacgcgcggctcgacctgtccgcgtgcccgcacgtcgtcaccggatcgggcgggcaccactactacttccgcaagcccgccgacgtgcagctcctcgacagcctggagacctaccccggcctggagttcaagagccagggccgccaagtggtggcccccggctccgtgcacccgaacggcaggcgttacgagtgggacgacctggcgccgttccccgaggaggcgccgcaggtgcccgacgcgctgctgcgcctcatccgccggccgatgcgggcccacggcgaggcggcgggcttcggcgaactcacgccggagatgctggcggagaccctggagcagctcgaccccgaggcgttcgccgagcacgacaagtggcgcgacctgatgatggcctgccaccacgccaccgcgggcgaggggcggcaggagttcatcgactggagcacgcaggacccgaagtaccgcgacgacgcctgggtcatcggcaggcgctgggactcgcttcacgccaccgcaggcaagggcgggcggcccatcacggtgaagctgctgcacaagttcgtgcaggaggcgggaggccacgtcgctcgcgtcgacgcggccgacgacttcgacgcgtgggaggaccccgaggacctggggcgaggagtggacgacgccgcgctgcgcgagccgtcgaggcccgagggcaaggccgccgtcctggaggagatgaacgcccagcactgcgtcgtcatggagaacggcaagttccgcgtcttcaccgaggagttcgacccagtactcggcaggcacttctaccagcgctccaccaaggaggacttccagaatctctactgcaacagcttcgtcgagcaggtcaacgacaggccgacgacgcgggcgcagttctggctgaagcacccgcagcggcgccagtacaagggcgtcatcttcgacccgtcgggcgaccacgtggggtggctgaacctgtggcgcggctgggcggtcgaccctgcgcccggcgactggtcgctcctggaccagctcatccgcgaggtgctgaccgacggcgacccgcagggctaccgctacgtgctgaactggatggccgccatgttccagcggccgtccgaggccgccgaggtggcgatcgccttcaggggcgcgaagggcacgggcaagggcacgctcggccgcgtcctccagcacatcgcgggggcgcacggcctgcacatcagctcgcccgagcacatcacagggcgcttcaactcgcacctccagaactgcatctgcctgttcgccgacgaggcgttctgggcgggcgacaagtcgggcgaggcgaagctgaaggcgctcgtgacggagccgacggtcgcctacgagggcaagggccgcgatgcggtgatggggaagaacctgatccacatcgtcatggcctccaactccgactgggtcgtgcccgcgggcctggacggcgagcggcgcttcgcggtgttcgaggtgagcgactcccgcaaggacgaccacgcgttcttccgcgcgctgaaccgccagctagacgagggcggccgcgccgcgttcctgcacgacatgctcgcccgcgacatccggggctggcacccgcgaaacgacatcccgcagaacggcgcgctcgccgagcagaagctgcgcggcatggacgtcgagcactcctggtggtactcgctgctgtacgcggccgagctgcccggatacgacgaggagagggactggcaggccggcgaggtcgagctcgacaagtccgacctgtacgacagcttcctggcgttcgcacgcaaccgcaccaggcacccgaggccgctgcccggcctggcgaaggtgctgctcgccaaggtgggcgtgtcgaagcggcagatcaggagcggagcgcgcaaggggcaatgggtgtacgtggtccccgcgctcgaccaggcgcgcgccgcgttcgccgagatagtgggcgctgaaccctcgcagctctggggctga

SEQ ID NO: 536594 - DNA, 1059 bp, Stenotrophomonas maltophilia
gtggcgaagatcgcggaactgttcggctggcgggtggacgaagaagccctccttgagcctcatgccaattggctgacctgcaactgcccgtttacgggcaaggtctgcgacgtttccgcgaatcggggtgaccgggcttacttcgaccccaacgggcccgccatcaccgacgatgaccgcgccatctacgcgaagcactacaccgcagcgcgcacccctctgggcatctgcaccgtatcgaccaagcgacggttcgaggcaaagtcgaagccgtggatcatctgccccaagcggatgatggagctacataccagccctccggtaatgcttcccgaggttaaggctctgattccgatcaagccgggagccgacgttcgctgctggtgggagttcaagttcgcgtcgagcgacgattccgaggagaacgagctcgcggggcgcttcttcgagttcaccttcgactacatcctgatggaggtcgattggagcgagggaggcgaccacccgaagctgatcggcgccccctacatcttggagatcatgacctccagcacgcgaggcggcggcttgacggagcacatggccgacgtgctggcgctacgtgaccagcgctcgctccgaggcgcggtcaagtccccctatacgcccaactaccggcaggtgttcgggcgcatggcctcgcaactgttcgccaagtccgaggccgccgcgagctggggtggcaagacgatctggattcttcaggacgtgctgctggagtacatccagcagacgacagcgttccggccggagccctttgtggacaagaaggacggcaacgtgaacatggtcgtctatcggatggacgagaacccgcagaccaagcagtacgatcttgcctatgacaagacgttggtaggcaactctcgcgtggatgacgctgcggctcccgacttcacgtcgatgctcggcatcggccacatcccgtcgctggacttgctcaagtccactttggagcgaacccagtcgaggcgccggaaacccggcgaccccgtcaactggattgacttcaagtggtga

SEQ ID NO: 536595 - DNA, 1389 bp, Stenotrophomonas maltophilia
ttgattaggaagaaatattctgttgcggacttctttgctgggtgcggtgggctctctcacggtttcgagctgaccgggcggttcaacgtcctcctaggctcagacatcaagcccgaggcgctagagacgttcgtcgagaaccacgacaacgaccagggcaagcccgaggccatcctcgaggacatccaaaaggtcgcgcccaagggcgtgctcaagatgctctctcggtttggagtgaagtcagaggggcagcttgactgcctcatcggcggtccgccatgcgagggcttcagccagaaccgatccatcaacgcgggaggcaaggttactgaaggcacggcctcgcgcgtcaaccgtttcatggacgatccgcggaaccagctcttcaagtggtacgttgagctggccgcctatctcaagccccgagtcgtcctcatcgagaacgtgcccgacctcgtccggcacaaggacggtgggacgctcaaggagattctcgacgctctggaccgcgcgggatacgttgcgtcggtaagggtgctgcacgctgctgactacggggtgccgcagatgaggcgccgcaccatcttcctcggccagcgcaaggaggacttcgcgcgcacggggatcaagctgcaattccccgagccgacccacaagccgttcccgctccactacgagggcctggaggaggatcgcctttggctgcccggcgactccggctattggccttcggtatgggaggccatcggggacctgcccgcgcccatcaccaaaggcgccgagatggcatcgatccccgctgagtacccgtcagccgccgactcggacctgcggcgctactaccgtggctccgccccgcagatctacaaccacgtcgcccgaccgctgggtaagagcggcttggagaaggtgcgggcgatcgcaaaggggcaggcagcctcggacctgccggaccacctccgcccgaaggcgtcctatcactacagctacgcccgcctgcggtggtcggagccggcgcggaccatcaccaagttctgctatcacgttgggtcgggcatgttcgcccaccctgtcgaggaccgtgcgctcacgatgagggaggccgcgcgccttcagacattcccggactccttccgcttcgtctcggacaacatccgcgaactgtctgcaatgatcggctcggccgtgccgcccctgctcgccaagaagatcgcgtggtcagtctcgcgctacttggacgagattcagttcgccgacctttcgcccgaggacaagaagctggtgcggccccaggccactgacgctgtcctcaagcgcctacagggcgaggagtgggggcacgaggcggagcgattcgatcagtcggcgctgttcgccgaggaaggctga

SEQ ID NO: 536596 - DNA, 600 bp, Stenotrophomonas maltophilia
gtgaacacatcgattaatcggatactcgcgggcctcaagcggcgatggtgggcaatttttgtgccaattaggttgaagcagtcaggcctgactatcgggcgggatgtacagttctatggccatcccatactgactattgcgccgggctcaagcgtcctcctgggtgactcatcagtcatatgctcaagcgaggaatttactgcactaggcgtgtctcgaagaacgattctaaggacgatgtcgcccgaatcagagatcagcatcggaaagcgcgccggcatgagtggcgcgacaatttgtgccaacactcggatacaaattggcgatgaatgcctcattggcgccgacgtcatgatagtcgacaccgactttcatccgattccctcggaaaacaggcgcttctcaaaggaaggaataaaatctgcccccatcgtcatcggcaggaacgtatttattggcgctaggtcagtgatcctaaagggcgtgacaatcggggataactcagttatcgcagctggatcagtagtaagtagaagcgtacccgaaaactgcattgctggagggaacccagcgaagccaattcggaatcttatccaatga

SEQ ID NO: 536597 - DNA, 315 bp, Stenotrophomonas maltophilia
atgctgaaggtgattgccgcggtgtcaccatgcgagctgccgtcctttgttgctgcgttggacgaagcgatagcacggtggagggcggagtctgcgagtacgcccagcagcgatctggatgcagaactggcgcgcctgcacgcgctcaagagcatcacgtcggcgctgggcagcaggctgatcgccagcgcgtgcgacgacctgggtgagtgccttcgatcgggcgcggcggcagaccacatacgacgccgctcccaagccttggcggtagcggcgcagcgccttctgcaacgttacatcgtttctcacaggtga

SEQ ID NO: 536598 - DNA, 564 bp, Stenotrophomonas maltophilia
atgcaggacgtaacgcaacgccaatgcaaagttgtgtccgacagccgctggtcgctcagtaccttcatggaattctatgagcggatattgagccctcgcattttccagccttacgggatgctgctggccggggaaatcgccagcgacatcgatgcagggttcgcggtcaaggacgtgctggaagtggcatgcggcaccggggtgatcaccgccagcctgtatgaggatcttgcgcggccacggggcttgcggctggtggccagcgatctctcgcagattgcggtggacatggcccgacgtgtcctgaaccccgagatccagcagaacgttccgttgttggccgacgtggacatggcagagcttccattcgatgacaacagcttcgatgtgattgtctgcggcttcggcctgatgttcccgcccgacaaggcgcgcgtggccagggagttccggcgcgtgctgcggccggggggcgtgtctacgcgacgatgttccactacaaccagctcttcgaactcacccgccagcaatcgcagctgcatttcggcatgccttcccggttga

SEQ ID NO: 536599 - DNA, 615 bp, Stenotrophomonas maltophilia
atgcgggcgtcctgctatcacccacgccttcatgggatccctcgtcctgggcctggtctccttcagcggtcggcgtggttccagcacctccttgattcacgccagtcccaccgtaccggcctcggccaggcgccgggccggttgctgctgctcgcgggttggcggcaggccaggaggtggcggtgccggctggatcggcgtggtgtcagtcagccgggcaacggccttgcgcaatggcaggtcgggatacagcctggaggcgcaccagcgctcggcgtagcgcttgccctgagacacgctggcggcaaaaaccttcttggtcttgaagatctttcgcgcatccaagtgaagccggacaaggcctgcggggcacgttcgttggtgcatctggagtgcttttgccgtgacagcggagtgtcactccacgtcgagtcgggggccgccgtgtcccgctcaagcccgcgtcccggaggtagccctggaaagatgacggccggtacatcgacgggtagccctggaaagatgacggccggtacatcgacgggcagctctacaacggccagcaagaaggtcaccggcaagaaagcggccaccatgaaggcagtctcgaagtag

SEQ ID NO: 536600 - DNA, 165 bp, Stenotrophomonas maltophilia
atggccgtcaaacgtgtcgtcgccaacatcgccacgcctgatcctgcgcgtgccgcagtgttctatggcgagctgctgggcatgccggtggtgatggaccacggctggatcgtcaccccacggcggcaagggcagcgcgctggcgcaggtcagctttgccagtga

SEQ ID NO: 536601 - DNA, 1065 bp, Stenotrophomonas maltophilia
gtggtggccatccatgaccagacgctccggcgggtccgcgatctacccgtgttcgatgagccggtcgagctggaagtccagcgccagcggctggcctgtcctcgctgcgggccagaactggagcatctggattggctggagcggcatgcccgggtaacacaacggctggcgcagagcgtggcacgcatgtgtgccacggcctccatccatgccaccgcaaagtggcatggcttggactggaagacggtcaaggcgcttgatttcaggcatctggtgcggacgctgggtccggtggacctatcggaggtccgggtgatcgcgatggatgagtttgcgatccaaaagggacatcgctacgccagcgtggtggtcgagccttcacgcaagcgcgtgctttgggtcggccgaggacgcagccgcgcagacgtacgccccttctttgagctactcggaaaggacggctgcgaacgcatccaggcggtcgccatggacatgaattcggcattcgacctggaagtgaaagcccaatgcccaaacgccgaagtggtctacgacctgttccatgtggtggccaaatacggccgggaggtcattgaccggggccgtgtggatgaggccaacaggctacgccaggacaaacctgcccggcgtgtggtgaagacctctcgctggctcttgctgcgcaaccggcagaacgtcccggccgagcaacgagtgaagctcaaggagctgctggctgccaacaaggccctgctgacgacctatgtgctgaaagacgacttgaagcaactctggcgcaaccgtagccaggcttgggcagaaaaagcatggaagagctggcgacagcgcgcattgcgtagccgcctggagcccctgcgaacgtttgtccgtcgcctacagccctatctgccaggcatcctggctcattgccgatggccccttggaacgaatctggtcgaggggatcaacaacaagatcaaggtcatcaagcgcgtcgcctacggataccgagacgacgcctacttcttcctcaaaatccgtgcagccttccccggagttgggtga

SEQ ID NO: 536602 - DNA, 1272 bp, Stenotrophomonas maltophilia
atgtctgaagagctttttcgcaaggaagtgttggacgctaggcgtaacggctggctgggagaggtttcggttgcgcagcctatgcgcgtttggcttctcacatggatggcagccgcagtggccctctcggtcgtcttgttcttggctttggcaacctatacccgtagatcgacggtaactgggcagttgatcccatccacgggcatggtcgctgtcctgtcgccagccacgggcgtggttagtcaaatgcgcgctctcgaaggcgaggaaacgcttcccgaccagagactagcaattgtgacggtgcctagggccacgattgccggaggcagcgcagccgacgcaatagcctccaaattccagaatcgccgcgaaggattacgtactgcgctcaatgcccagatggccgtccaagacgtccagctcgacggcttgcagaagcaactcgcgcaggctcgtagtgagcatcgccagctccaactcgagattgccactcgaatggagcaaatcaggatcgcgaaagaaactctggatcgtttgaagcagctcgaagatgagcgttacgtcagtatcttacaaatcaagcaacaggaatcggcgtggctcgaccacactgcgaacgttcaagccatgcaacggcaggccaccagtcttcagcgttcaatcgttcagcttgagcagtccgttcgcgcccttcctggagatcggaagaaaattgaatctggatttgaagttgacttggcgaccctcgagcaggaagaggtggagaatgaggcccgcggggcattggtcgtcaccgctccggtagccggggttattgccaaccaactcgtgaagctcggacagtccgtcgacgctggtcagccgatgttgaatatattgccggagggtggcgtgctcgaggcagatctactagtccccagtcgtgcgattggcttcattgccgttggcgatacggttcagcttcgctatcaagcctttccctatcaaaagtttgggcaccaggtcgggcaagtgaaattaataggccgatctgcgcttaatagcagcgatctcggatcgctgatcggggcggcgcgaacaaatgaaccattctacagagtcaccgtctctctaaagtcacaagaggtcttcgcttatggacataaagaatccttgaagccggggatgctgcttgaggcagatatactgggagagaatagatccttgatcgagtgggtctttgagccactctacgcactgaaaggcaaactcctaaaggaacaaccctaa

SEQ ID NO: 536603 - DNA, 201 bp, Stenotrophomonas maltophilia
atgcgtgaacttaccatgatcgagatcgatgcagtcagcggcgccatgaacgatggccagcgctccgcgatgtacgctggtattgccgcggtctacggtggcgcagctgctatcccgagcccgctctcgccggccctgggcctgatcgcgggggcatcggcagcagcatctgcctattacgcttaccaggctgcaaagtaa

SEQ ID NO: 536604 - DNA, 321 bp, Stenotrophomonas maltophilia
atgtgtgcgtacgccctatttacaagagaggaccagcatacatttatcgcctttggaattttcatggcgatcttttctgcaaaaatgtttacacagcgcttggtcagggtcaactttgcaactggctgccaggcacagcccgcgccgtttgccacaaggctgaacaatctcctcaccgcagtaaatctgctgatgctcggcatggcattcattcgccttacgggaaggttctcatcgttcttctttgaagctttcggcgtctcgatgattggccttgcaattgcctgttccctggcgttccacaacggcagaaaacactag

SEQ ID NO: 536605 - DNA, 1764 bp, Stenotrophomonas maltophilia
atgtcggaagtgtctcgtcactttaccggaatcgggctagaactgagcccaactgatggctttgcccggcaagccgagcctgcgcccgtttcactgaaagaactgacaggccctttgcgcggagttaagagcgcacttgtccagattctgcttttatcattagcattacaagtattccttctgatcgctccattcttcatgcagtgggtcgtcgatcaggtgcttgtaacctcggatcatgatttgctcaccgtcctcgccgttggattcggcttggcactcctgctgcaagttgcgatcggacaagtgcgtgcttggtcagtaataaatatttcagctcaactgggcctgcagtggactcgaaatgtaatcattcacctcctccggttgcccttgaaattcttcgaggctcgccacttgggcgacgtcacctcccgactgggatctattcaatccatccaaagaacccttactacaaattttgtagaggcattggttgatgggttgatgtctattgtcacactggcgctgatgctggtctacagctggaagctagcatctgtgaccatgctcgcagtggccgcatacttactccttagatgggtttcatccatccccttgaagcgaagaaccgagcttcatcttgtggctgccgccaggcaggagacccatttacttgaatcgattcgcggcattcaaagtcttaaggtggcaggtgaagaggcacaacgaggtgcggcacattccaacttgatgcaggacgctgtaaatcaagagatccggttggcaaagttcgcgcaggtgtttgtaggcgcaaatcagctaatatttggactagagcgagtccttgtgatttggatcggtgccaacctagcacttcagagtgtcttctcagtaggcatgctcatcgcttatctagcatataaggaccaattcgcgctgcggatggcgggcttggttgatcgtgccatagagtttaggctgctgcggctgcacggggagcgtctcgctgatatcgtacagtcagaacctgagtcatcgaacccaggaggattggggcgccctgattcactgagaggcatagaaattagaaatgtttcctatcgttattccgagggagaaccttggatcgtaaatgattgtagttttacaatcaaacatggcgactcggtagcgattgtgggcgaatcaggctgtggaaaaacaaccctcgtgaagctcattttgggtttactaaagccggataaagggtcactgttgattggcggcatcgacacatcacaattggcaaccaacgatctcagggcaatgatcggagcagtgatgcaggatgatcaactcttcgccgggagcatcgcggaaaacataagcttttttgactcggatcttgacttcgacagagttcaaagagttgcggaactggcagctattcacctagatatatcggcaatgcctatgggctatcagacgctgatcggtgacatgggaagttctctctctggtggccaaaagcaacgaatagtcttggcacgggcactctatcgcaacccgctcgtgcttgttttagatgaagccaccagccacttggatgtcatgaaggagaggcttgtcagcgacgcgatcaagagtctgccgatcacaaggataatcattgcccatagacctgagacaattgccagcgccgatagagttttggtaatggagcaaggacgcatcgttcacgagtttggagcccaggtacaactagaaacagctagcccttaa

SEQ ID NO: 536606 - DNA, 1065 bp, Stenotrophomonas maltophilia; identical to SEQ ID NO: 536601

SEQ ID NO: 536607 - DNA, 510 bp, Stenotrophomonas maltophilia
atgtcccgttccttccttcagctggcaaccaccgcggcgctatgcctgagtgcttcggccgcattcgctgaccaggccacactgacaatcaccggccgtgtgctgccgggtacctgcaccctggcggcgcctgctattgacttggacccgatcaaggccgatgaactggtgcagggcgacaacaagctcaaagctggtaccttggacttcactggctgtgtgggcgtgggcaaggccacgctgtccttcgccggtactgcagccgatggcgatgccgatcgctggaagaacaccgccgccactgatgcggccgatggcgtatcggtcgcattgctggccggttccacaggaaacacgtatctgaagaacggtgacaccggcatagaggtggtggtgagtggtgcgacagctagctacccactgcgagccggctactacctgccggctgtggcaggggtgagcgcaggtgccgtgcaggctgaaatcgtggtgacggcggattacgagtga

SEQ ID NO: 536608 - DNA, 933 bp, Stenotrophomonas maltophilia
atggttgcaggcgccgggactgcccgggcctgcacatcgtctgagtaccgggcgatgaaccacgacagcgtgcatcaaacctatccatcatggcccggccaggagattgcaaaagaggtcgccatccaccacatccgcggttgtactgtgccggatgaagaccttgcgatggacgtgcgcgtcgaattcccgggattgcgccccgcaggaaccatctactggcaaggagagacatttcctgcctacgaagcggcacccgactcgccactgatcattttctactggatccaggccctacccctgtatccgccgctcacaccgctggaggtgggggcggcaatgccaatcgtcaggacatccacgggaaccctgccggcgaacgtgcaattcaattcgggcgttgccttcttcacacggtcggacgaccgtcgattgcgatcgtttgagattggtggagggagcatgcatgtcaatgcgggtgcttacccatccgtcagtggcacgtttccgcttcatctgaagatggtctttcctgccacgacctgccctctggatgatgcggctgagacgctgcaggatgtgcaggttgccgaactgaccacgccgggaagtactgcgaaggagaaagtcgtggcactccgcatgaactgcggggttgatgcgccgcgagcaagaatgatgctgtcggatgcagcagatgcgtccaacacgggcagtctgctcaccccaagcgccggatcagacgcgaagggcgtgcgggtgcagatgttgcgcaatggcagtgaagtccagtttgggcagcaatgggatttcgatcccggtactggcggtgtgcacgaccatgcattcactgcgcgctacttccgcactggtgatgcgttgcagcctggcttgatcaggggcgaggcggtattgaacgtggactactggtaa

SEQ ID NO: 536609 - DNA, 414 bp, Stenotrophomonas maltophilia
atgacttcttcgctctatccctatctgttcgccacactgggcgatgccgttgaacgcctgccggatgacctggccaaagcgctggaaaccacgctgggcagcacgatgggcgcccacgccgacgagggcattaccctgctcggctgcctgcagcgcattcgccacgtggaggccgccgacgggcgagcgtggccctggaaaacccgcacccagggtcatggcatcgcgatggcacgcctcgaccgcgccaacgccgggctgacgctgctgctggaactactgcatgccaccgagcgtgtgcgcgtagacggcgatgagggtcagcaggtgggcgatgacgtgcgtgagggactgctgctggcctgccgcgggctggccgagcatgtggatgtgcagttgcgggaagccgtgtag

SEQ ID NO: 536610 - DNA, 3123 bp, Stenotrophomonas maltophilia
atggactttattgacaaacagattcccccgccaaagtcgtgggagaaattcgaagatttgactcgcgcactgtttgccgcagtgtggaggacgcccctcgcgcaaaagaacggtcggtctggccaacaacagcacggtgttgatgtctatggaacgccgcaggctacacccggaaagaattttggcgtgcagtgcaaagggaagaacgaaggctacggagccaaagcgactatcgtggagttcaatgcagaactcgccaaggcggagaagttcaaaccaacgcttggacattggacgtttgctaccacagcgcccaacgacgcacgacttcaagaacatgcccgactcgtgtccgagcagcgcgttaaggaagggaaatttcctgtagttgccattggatgggacacgattcaagcgctgctgtccagtcatcaggcagtggtcgaagaaatctatcccgagcatgcaggcgatctcccaaaaatcatggcagcgctgcgtgcgctaccaggagccgacgaactcgatcagatccgtcggagcctcattgcgttcgcgccacgatcagcagcagtcaatattgaggcgtctgtgtggtccgaggttcagttcgaaatggcacgtgatcttgggcctgcactgatggggcgttcactcgggcccgcagatgtcgcggcttgtcccacacttccggaggtagctctgctgactgccgacttggagcgcgccggatctgctcgactagcgggtgtgccgggagctgggaaatcaatctcaatccttcaagtggcacgccaaatgcatggccgcggctggcgggttctacgtttagctgacccgattggaaaggtgcctctttttgacgagagcccaaaaccgaccctctacatcgttgatgacgcacacctgacccgccccgcattgcttagtgagttggaagagcgggccactgcatcgcgatgggtgttgagcgcgtacacgatctctgaagacaagggcggctttccgggtgccatccagcttgatgctaagcgcgcggtccgggttattgcggagggtttgcgggcttcccccgaagcgacgcttgccgctgttcgtcgcgccgatgatcggatcggcgatcgtccaggagatgagcagctcgatctgcgcctcgagcaggctgcggagcaagcgctctatccgtggcaattttgtttcatcctcggaggaggatggcggcgagcgagtgcattggcaagttccgcgcgtgcagcaggagcggacttggtgctcgccgctgcggcaattcgccagttggcagcacgtgatgcgcattgttcgcgcgaagcgttgctgcaattggtcggggacgcgttgccgaactttgatggcaatgccgcgattgcttggcttgtagcgcaacgatttttactaagtgtcgatgatcttcgctgtccacatcagcgtctcgctagcgtcctccttgcacgtattctggacggtcagacagccaaagagcgccagacgattgccactatgctcagaacagtgctcgccgacgttgagatgccgctcggcggcctaggtgtgctgcttggcgaactttcgtccgctggcgaatacggtatgtggcgtcgtcttgtgcagccggcatggcttactcccgttctagaacgctgctgggtagcgacggaaccacttggcattcggcatgcctgttggttactcagcaacttgcatggctatctgcccgaagagatgaatgtgattgccgatcacaaggaaacccttgcagagtggatacaggcggcgcccgaaggcgcatgctatgcgattggccgcgtgattaatcatgtgctcaataccaatagggcacttggcgaaagcatcgtcgcgctagctgatccacgcacattggcgacggcgatcagtgtcgcagccccgttgcatgctggtgagatcgccaatttgctttcgatgatgggtgctggcagggatgatgtgtggaaggcctgctatcttgaacacgtcgaccacgacgcgtgccatcgtatcgtgtcaacatggccgcaggacgcctacctgtcggtcgttgccgatttttgcgagcatttctgctacttcgaaccagaattcgggttcacgctgattgaagcactgatcccggccatcgccgatcgactacgtgccgctccacaagacgcgttcgacgaactgcgcgatatcgtgtggaacgcgttgcggctttacgatccgcttcacatctatgtaggcaagttggcaccttctcggcgaatgcggcaggtagggcgaaagatctgcaggtgctggtcgccgaatgatctcgcaatgagtttgtcgcgtagcacgcaacgaaacttccaagcagccgcagggcttcttagcttcatgcatagggcgtcgccaaagcagttcgaggcgacggtattagcgctcgattggggcgagatcgaccaagcgataggcccagattgggcggaaaatattggcgatgcaagaatgctgctcggggtcgcgtacgccgtacctgcggcgagactcgcaatccaagcgatggttaaatgcaatgaaccgcgtatcgtcagcatgtcgacacatctcgcagcgatcgctcctgctagcgcgctacgtcatatagcggcgggcaagcgcattgcgctctgccattggggccacgtcgattggcaactgggagcattagtcctggcgaggatggttcagtcggagccagcactagtttccgctttactcgaaccgcactacggtgggttggcggaggcgttgtcgcagcccagccccactttctacaatgaaggactattgtttctacgccttctcgcgcaggttgaggctagtggcctaactcgggtgctagatcaaatcgatgtaaaaagggcaaagctgggctggcgtgacgcgcttcgcggtcgggagaacagtcgtgagcctggcgcaaaggcgcaggcgcggcaggttgcttctttgctggtccatcatgcgttggatcgcggtgatgcagttggcgagcttgcgcgccaactgcggcacgactttccccgtcaatctttaccggctgcaaagattcttgagccgattgaattgagtgacatgaatgaatga

SEQ ID NO: 536611 - DNA, 1509 bp, Stenotrophomonas maltophilia
gtggcaagagagaacaagtttgcaagctcgggcggtgcaaaagagacgcccgtgggaaagctcatggagaccatcgtcgaggacgtgatcacggcgaaggcgatgacctttgcacaatggcatgccctcagcgggaaccccttggttccgcttgccattccggtgtcgcaaggcgggcagtatcgggtcacgcaagcaggcgtggacgcagctcacttgctgtcacagcaaagctggaaatcacgcgaagccttgcgccagacgattgatcgggaggccttcatgaagctttcgttccaggccatcggggacacgcttcgcgactgccaatcgcgccttccaatagtaccggatggccagaatgaacacgacgtgctgctcggtgacgatttttatgcggtgctcgccgacgactaccaagcgcgcctgcagcagttggccgccagcgcgagtcccgacgtcgaccggcatatcccttgccatctgtttcactcggatcaggccgtgccggcattctccgtggggccggtgcgattcctgccgagagtggaatggctcgattcctttgtcaaggactcggaggtccgcgagctcatccgccaggtcgaggctggtgaactggacatagaggagttgaccgctcgatcaactgccgccgagggtggtcgccgcgcgtcgcatgcgttggacgttttgcgtacgctgcgccattacagctggatagcttccatccggatggaagggcatgagcatgcgcggtcgcatttcaaagcgtcggtggtggtgggacttgcgattgacgcaatcggactgaggttccaggtcggggatgcgcgacgatttacgaaagctggccggcagcatctttttgcagaggaccggttcgcgaccacgctggacggacggatattgcgtgggtcgagcgtacagatgcctggccttggcggacgcccccgcgcgctggctgccaagatggcgggcgaacaatccttcctggatgccgccggatgcatcttgcagcactacgtcgttggacgacgaaccggacatgcgctgcatctcgtcgaacgctgggccaatgcgctgtattgggtcggtgaagctcgtcgcgaggcttccgacttcatggccgttgtggactatggctgcgccgccgatggcctttccggcgccgggggaagcgccaaggacatgaccgccttcgccgaggcagccctcaaaccgatcgatgactctgcgcctgatgggaagctcactgttgatgctgcagtcaatactgtttatcgcgaagggcgcaacaagctcgcgcatggcgagatgtcagggctgctagaggatcttgcggagccgcgcgcagtcggtgaagcgctactgacagctctgttcgatgctgtgaccccggtgctcgctgatctcctcaagaacgaaccaaatctgtttaaggttgatgagaagcctgcatatcgtctgcttgtggcaagactggcagcgaagaaagcaactgcttga

SEQ ID NO: 536612 - DNA, 1419 bp, Stenotrophomonas maltophilia
atgggccccgctgaaatcgacctgcgcgggatcgcccgcggcacggttacggcaccggccggatgcggcaagacgcagttgatcgcccacgccctggccgctcacggaggtcgcaaacccatcctcgtgctcacgcacaccaatgctggcgtggcggcacttcgtggccggttggaccgtgccggtgtgccgcacagtgcctatcgattgagcaccatagacggctgggccataaggttgattgcgagctttccggggcgcagcggtcatgacccggacatcctgcggctcgccacgccggcgcgggattacccggcgatccgcgaattcgcctggaagctgctgcaggcggggcacgtcagcgaggtactgaaagcgtcctatgcgcatctcattgttgacgagtaccaggactgttcggtgcctcagcactatctcgtctactttctctcgttgatcctgccgacctgcgtgcttggcgatccgatgcaaggcatcttcggctttggtggcaacgccttggccaactgggagcaccaagtgtgcgcgcatttcccggtcgtggcggaactggccacgccgtggcggtggcgcaatgctggtgcggaagcactcggacagtggctcctggaggctcgccgcctgttggtggctggtcagtcggttgatttgcgtaccgggccactagcacatgtgacgtgggttcagaccgtccctcccaacgaccacccgcagagactggctgcggcgcggacaatgccgcctaccgccgacggtcgtgtgctgattatcgccgacagccgtaaccgttcgagccagcagaacttcgcaagccagacgccaggggcctcgaccgttgaggcggttgatttacaagacctcatcgccttcggcaatagtttcgatgttgcgtctgcgggggccttggggcaactgctggcgctggcgcaaagcgtcatgaccaacgtgggtgtcgcagagctgacacggcgtctggagtcgttggcccgaggaaccgcaaggaatccgccgtccgcagcggagagcagtgccttggcgttccagcgcggcccgtccatcgccgcagccgcaacactgttgtcggagttgcgcgaaatgccgaacgtgcgcgtacatcggcccgccattctttacggcgtactcaaggcgctgcgtggggcctcggcaggaaacgtcccgcttgctgaggctgccaggcgcgtgcgcgaagagaaccgattgttgggccgcccgttgcccaagcgtgcggtcggcagcacgctgctgctcaaagggctggaggcagaagtggcggtggtgctgaatacggagggcatgagcgcacagcacttgtatgtggccatgacccgcggatcaatgaagctggttgtgtgtagcgccagccccatattgggctaa

SEQ ID NO: 536613 - DNA, 1731 bp, Stenotrophomonas maltophilia
atggcaagaataagaaaaatcgagatcgccaacttccgtggcatcaagcaattggtgtggtgtccatcgcctggcatcaattgtctgatcggcacgggtgacagcggaaaatccacggtgctggatgcgatcgatctgtgcttgggcgccaggcgcaatgtgcagatttccgacgctgactttttcggcctggacatcacggctccaatcagcatcacgctgacactgggcgcgctggatgacagcatgagtacgctggaaagcttcggtgcgtttctgcgcggttatcacgccgccacgggcatcgtcgaagacgagccgtctgccggtgcagaagtggttctctgcctgaatctgaccgtcgccagcgacttggaaccatcctggactcttatctccgaccgcgcctcccagcaaggtctggtgaagacactcgcatggaaggaccgtctggccttggcgccgacgcggatcggtgcgctcgctgactacaacttggcctggcagcggggctcggtgctgaaccgcatctcggaggaacgcgcggatgcttcggcggcactcgtgaaggctgcacgggatgcgcgcggcacctttggcgatcaggccgagcagcaattgggagaagcgctggggatcgtcgctgcgaccgcccaggaactcggcgtccacatcggcgcgaaggcgagagcactgctcgactcgcattccgtgtcgttcggaggcgggaccatctccctgcacaacgagggcggcatcccacttcgcagtcttggcgttgggtccacgcgcctgttggtcgcaggtctgcagcgtaaggcggccagccaagcctcgatcgtcctttcggacgaactggagtacggccttgagccgcaccgcattgctcggtttctcggctcgctcggagcgaaggaagcggccccgctgcaggcgtttctcaccacgcattcgccagtagcgctcagggagttgtcgggcagccagctcttcgtgctgcgccgcagtctccacggtcatgaggcccgcatggtgggccccgataacgacacacagagcaccattcgcctctatcccgaggccttcctggctggttccgtggtcgtgtgcgaaggggccagcgagatcggactcctgcgtggtctggatttgcaccgaatcgaacatggcggcgtgtccctgtcagcacagggcattgcgatggtcgactgtggcggtggcgagcccgaccggccatatgctcgcgcggcggccttccagtcgttaggctacagggtgatggtcgtacgggatgacgacaagaagcctacgcctgccatcgaacatgcattcctacaggccggtggcgcggtcgtcgcctatcgcgcaggccgcgcattggaggacgaactgtttggcagccttacgccagcggcttgtcaaaagctaatcaactacgcatacgaactgcatggcgacctgatccacgaacacctgcgcaccgtctctaacaacacgctgaccgttcaggccgtctgggacgaaatccagaacacgcaagcgctatcagtgccaagccgagccctgctcgggcaggcggcgcgcatccgcaaggccggttggttcaagtccatctcgtggatggaggatgttgcaaggactatcgtggcgccggacttgccgctatgcgatccgggcttcagggcacttgtggaccaagtatctgcgtgggctgcccatgggccccgctga

SEQ ID NO: 536614 - DNA, 714 bp, Stenotrophomonas maltophilia
atgcttgaatggtacttggaggtaaatgccctgtttcgggcaatgcgtcagaaagcgatcgatgcacaaggcctccttgcgagcgacgataaagcaggggccaagttgatcaatggctatttgaaagctgactatcaactactgcgcaagctgtggaccggtgcagggtttcctgagcaagacatgggaaatcttggcaggcatatcggatttggcgacgccaatgactacgacgacatccttgcgcgcgatcttccccaggtagaggtgagggcggaagcgcatgtgcgtgaagcgacgggtaccaaaccgagcataggcttcgaggaactgctgcatccggttatcttcgcgcatgccttccagcactatgtggacggacactaccgcgatgccgtcttgaactccgtcgttgcgatctttgatctgatgcgagagcgcactggcctggacctcgacggcgcggctctggcgacacaagcgttgagcttggaaaagccgcacttgatcctcagcgaactcgacacggagtcgggcagaaatgaccagaaggggttcatgcaaattttggtcggtgcctatcttggcattcgcaatcccaaggctcattcgctaaatcatgatctcgacccggagaaggccgcacagtatctgatcttcgccagccttctagcccgacggatctacgaagcgaaagacgctccgaaggcctga

SEQ ID NO: 536615 - DNA, 909 bp, Stenotrophomonas maltophilia
gtgataagcgactacttcagcgatcgtcagaacggtccgcgcgcacgcaccgagcaggtgatttctcccactgtctgggcgggcctcgtggcaacggtacaggcgttgatcaatagcggtgcattcggcctgcgttttcccgaacgctgcccggatggacaagccacttgcggcggcgatgtggacgccttggcggcttccgtaagcgcagaaatgccgggtctggcttggccgttggagacagtctctcttgatggggagggctactttgccaagcgccagccgttcgcgccggacaccttgctcgtcttggacttcatcgaattcgttcacgcgtcagtggcaaagccgatctcggggaagtatcacgacttcttcagtcatcaccacctgaccttcgaccaggaagcggggcaggaggacttccgcgtgaccgtcaatcgcatcttcgcgcgcaacggggttgcattcgagatgctgcccaatggtcgaattgaacgagtgctcccgccggtgcttggcgaagaactgaaacgaacgcttttcaataccggagatcgcacgctcgacaacatgctcgacgagtgccgggccaagttttcggaccgcaatcccttagtgcgtcgcgaagcgctggagcggttgtgggacgcatgggagcgactcaagtcactggctgacccgagcgacaagaagcgttcggtcaagatcatcctcgacgcagtgacctccgtgccgtcgctgcgggagagattggagacggaagcgacagaacttaactccattggaaacagtcacctcattcggcactcggagatcagccaggtgccggtgatcgatgtggaccaggtcgactatctgttccaccgactgttcgccatgattcagctgatgctgaggaaaaagtaa

SEQ ID NO: 536616 - DNA, 3000 bp, Stenotrophomonas maltophilia
gtggcgatcaaagcgattttcgtcggtatcaacaaacatctcgatgcgaagatcccagagctgagcggagcccgccgcgacgcgactgcgttgtgggcactgttcaccgacaccattgagggtttggctggtcgactgcttgtcgatgaggcagccacacatgccgaggtatcgcaggcgatccttggggcactgtcggccgcgggccgggacgacgtggtcgtcatcacattcgctgggcacggttcttccgatgggaacctggtcctgttcgataccaacccaactgatctttccagcacaggcttgtcgatggccgacttggccgatgccttcaaagcgacgaaggcgcgtgcggtgctgtgcgtgcttgactgctgcttcagcgggcaggcgcctgcacgcgtactggaggctgcagcgcgcccgcgaagcgcatttgcgttgactgggatttacggcgaagggcgcattctgcttgccgcctgtgcaaccaacgaatctgcctgggagcagccgggcaccggacacggattgcttacgcatgccgtgatagaggcgttgacgggtgcggtcggcgactcggtcagcttcccggaaatagccggcgagattatccggctggcgcgtgtcgaggccgagcgcatcagcgtgacacagacgcctgtattcctgggcaacgtccagggtggccttgtgtttccagcccttaagcgtggtgacaactacgccgctgcgttcccggccagagcggtccagcaaatgtcgggatcatttgcggaattttccgcgcacggctttccgccggagatcgtcgatcagtggacaacggacttcccgcgaggcctcaacgcgcttcaactcaaggccgtcaacgaacacggcgtactggccggcagatcgctgctggtggtcgcgccgaccagctcgggtaagaccatgatcggcgaactggctgcgattcaggcagtcaccgccggcaagaaagcggcgtttctgctgccgtatcgggcgctggtcaacgagaagttcgaggagttcagcgagcgatatggacccgcgggcctgcgcgtcgttcggtgcagcggtgatgcaacggatggcattggccccgtgttgggcggtcgctatgacctgggtttcttcacctacgaaacctttctcaatctggcgctcggctcgccgcgcctgctcaaccagctcggcctcatcgtgcttgacgagggccagttcatcacggacccgaatcgaggcattacggtcgagttgattttcgcgcttctgctgcgggcgcgtcagcgcggcatcgaaccgcaactggtgatcttgtcggcggtcattggcaacctcaacagcttcgatcgctggctcgacctgcccttgctgatgtcccgcgagcggcctgtgcccctggtcgagggcgtgctcgataggcgcgggatgttccagttcgtcgatgcggacggcactaccaagaccgaagccctgttgcctgcgcatcgcatcgtgcagcgtcgcgacaagcccagctcgcaagacgtgatcgtgccgctggttcagcaactggttggacagggcgagaagttgctggtcttccgcaacatgcgtggtccggcacagggctgcgccaaatacttgtccaaggaattaggcctgggtcctgcgacgaccgtcctggacgtgctgccgaatcaggatctgaccggcgcctcgcaggatctgcgggaatgccttgctgggggcactgcgttccacaacaccaatctcttgcgcgcggagcgcgaagccgtggagaaaggttatcgcaacgctggcggcggtatccatgcgctggtggccaccacgacactggctgccggtatcaacaccccggcatcgacggtaatcctggccgagaacgagtttatcggtgacgacggccgcccattcaccgtcgccgagtacaagaacatggcaggacgggcgggacggctcggatacaacgagaccggcaaggccatcatcctcgccgacacgccgatggagcgcgcgcaactgttccagaagtacgtgctcggcgtgccggaagacgtgaagtcatccttccagcagcgcgacctgccaacctggacattgcgcttgcttagccaggttcggggcgtgcgcgccaccgaaattcctggcctcctggtcaacacgttcggcggctactctgcatcacgcgcaaacccgcaatggatcgcgatcgtggagcatgaagtcaccgcgttggtcgagcgcctgctgcaggcggggctggccgagcgcgagggcgagttgatccacctgaccttgctcggacgggcctgcggggcttcgtccttgtcgtttgagtcgagcctgcgactggttgagttgatgaaacaactgaacgccgcacagacgtcgcccacccaggtgctggcgatggtgcaggtcctcgacgaaatggatgcgatctacacaccggtcatgaagcgggggcggtcggagagcgtgcgcgccaatgatgtggcgcagcgttatgggcattcgatgacgcaggcactgcaacgatattgccgggacgagattgagttctggtgccgatgcaagcgcgcggcgctcttgtacgactggatcgagggtacgccagtcgacgtgttggagaagcggttctcgaccacgcccttcggaggcgctgtcggatacgggaacatcatcgggatcgccgacgcaacccgctttcacctgcgctcgacgcaccaaatcctgtcggcgctcttcccggaccagcccacgttcctggcgggactcgacgaagttctgcaacgactcgaattcggccttccggccggtgcgctgcagctcacagacgtgcggctcgctctgactagagggcaatacctcggactcttcaacgccggatgcttgacgccggaagccgtgaacgacttgagcagcgagcagctagaagcatgcattggtccaaccagcgtgtcgctgctgaggccacaagcttga

SEQ ID NO: 536617 - DNA, 642 bp, Stenotrophomonas maltophilia
atgccaaggcaggcgatccaagcacacgcgacagcgattcaagttccttacttgctgcatttcacccgcgcggtgaacctgccaaccatcatggctcatggcctgtaccctatcgggcgtgctcatgaagttggggccgcaccagccatcaacgatcagtaccgattcgacggtcatcgcaacagcacttccgtctcaatcggcttcccgaactgccagatgctctacaagtaccgcatggctgatgctgctgtggattggtcgattctcgttcttcacccttcgatcttgtgggcgaagaactgcgcgttctgccgccacaacgccgcagacgggcgcatcagcggccagctccttgcgaacttgatgactccccaagcctttcaggggatgtatgaggaaattgaaggtctgaccacacgcgaggagcagaagctcaagccctacgacccaactgatgtgcaagctgaggtgctggtcttcgatgtcatcgaacctcagtacgttgcaggcatcatctttgaaaagtcggcagtccgcgatgcttacctgccccatctgggagaacgaaaaacctacatccacgcagacaacaaagggatgtttgcgaatcggaagtatgcgaggacatggggcaattaa

SEQ ID NO: 536618 - DNA, 618 bp, Stenotrophomonas maltophilia
atggctgcatcgcagaagcaaaaatctgtcgattcgctccatgctgctgcactcaagctacccggcatcagcagggtgttggaagtgtccagcaagtcccgtgaagagcttggcgtagccctcagcgcgtttaacctcacgttcaccacactcaaacacaaccgcacgttcagcgtggaatgcgcttatcagggcagcaaggtattcgagcgcggtgggccgttcgtcgatatgttcggcatgacctcacgcgaggcgaagaaggacgaccggctgcgctcatcaggccgactgactggcttccggttcttcggcaccgattgggggctggagccgcagaccgcgttctatgattggctctacatcaatgctttgaagaagcagcccagcgtgaccgagcagcttctggaatattcggccttcaccgatattgagttcaaccccgagcgctcgatcaactgccaagcgtattcggtcgcgctctacatctccctgcacaagcgccacctgctcgacgaggccacgtcctccaaggaagcattccttcgcactgtgggtacagccgcaatcagcaacgcccgacaagacgagaccgtgcaaggcggcttcaagctctga

SEQ ID NO: 536619 - DNA, 180 bp, Stenotrophomonas maltophilia
atgaagaatgacaacctcgaccacgagaaccgcccggtcaagtacggcatcacgcccgacgagttgcgccagattcaacagcgccgcatcgaggcgcatgcagcccgcgagaccagcgacgcgctgaacctgctccgcgcggtcaagctgggcgcggcgttgcgcgagtctcaggactaa

SEQ ID NO: 536620 - DNA, 213 bp, Stenotrophomonas maltophilia
atgagcatctacgacaccgacagcattcccttttacggctggggtcggccaaagatcgaacgcccgatagacacaccacaggggcaagccgacctcaagctgatcgtcaatgtctgctatgaggcgattttgaagtgcgacgacccagcagtgcgctatcaggccgcgcgcctgttgcaagcaatcggcccgatgaaaggaacgctccaatga

SEQ ID NO: 536621 - DNA, 468 bp, Stenotrophomonas maltophilia
atggcggaaaccgaaacgccggaatggctgaaagcgcatcaagaagccaacgcttcgtcggcaggtcagcgaggctgggcacccggccagtccgggaacccacgcggcaggcccgcagggtcacgcaaccgaaagaatgtcatcgctgacgagtttgcgaaggaaggcagcgcggtcgctcgcgtggtcatggacgctgcactgcaaggcgacatgcaagccgcgaacatggtgctgcaacgtctgtcgcctccgctccgtgctcgcgctgaaaaggtgacgtttgaactgaccccggacgctccgctgcacgagcaggccaatcaggtgcttgcgtcggtggcggaaggcacgattgatccagagaccggaaagatgctgatcgactgcatccagtcggttgcgggcatccgcgccgttgatgaactggaagcgcgccttatcgcgctggaggaaaagaaccaatga

SEQ ID NO: 536622 - DNA, 717 bp, Stenotrophomonas maltophilia
atgcccacgccaattgatgcacgagtaacccccagcctccattcggagaatgttcgccagcttgacggctacagcgacgacagcgcgccatatctcggcccagtgatggaaacgctcgacgatgcctatctcacgctgggcaagattcacgatgcgcgcgatcacgctagccgcaatcaggcatggacgccggagcaggcagtgattgccgtatccgatgcggcctacaagcaacagcagcgccttctgtcgaagttcgacaagttgtccaagaccctcgatcagcagatcaagtcgatggacgagatgctgaccggccccctgcaacagaaggcaggcatgggcacgctgaacaccgagattcggaatcacgtccgcgcaatgccgaccgaggaacgccaaaagttcttgggggacgcgctggctcgcaaagacttgaccacgctgacggcaattctgggcggcccggggtatctgtccgggttgatggatgccgaggttacgcactacacgcgcaagctccatgagattcagcatcccgaggttgtcggccgccttaccgcccttcgcagtgccaaggctcacgttgaaaaagtcggcccgttggtgatgggacaggttgaaaaagcgatgggcgcagattgggggcgcgtcactgcacttcgtgaagccaacagcaaggcgcttgccgcgctcaagttcggcgatggcctgtaa

SEQ ID NO: 536623 - DNA, 417 bp, Stenotrophomonas maltophilia
atggaagccaagacctacacgaaacgcgagaacgcccgccgcgctggtgttgccgcaggggtgcccgctgaactggtagagatcaccgtgcataaaaacggcgacgaagtacgcttcggctggaaggcgatggaagcacttgcaaccgctgcggaggctgcgcccgtggtccccacaggcaagccgaagaaggcagcagccccaaaggtggagcgcgtggagcagaacggcgtgaagcgtccaaaggatggcgggctgtgcgctgccgtctgggcatggctggacgcgaaccccacggccacgatcaaggacgcgaaggccgcagcgccggggaacggttggaacgagaacaacgtggcgtgcgagttctacgcttggcgcaagttcaacggactgtcacgcgctaccgctgcctga

SEQ ID NO: 536624 - DNA, 1167 bp, Stenotrophomonas maltophilia
atggacttagcgctctacatcatcctcgttgcgcagagtggcatcgggaaggacgctattcactcagggattcccacgctgctccgtatgggcgaggtgaatcaggcggaattgttcttgcgcgcgacagactttgcaagcggtgaggcgctgcataagggcctcttggaatcgccaggattcttgtacttgcaaggtgagttcgggcgcagactcaaacgcatgtcgaatccgaatgacacgccgatgcagcagttccgcacggtgatgacgaacgcctatggaaagcagtaccttgagggaaagagctacagcaatgcggataagagcatgctcggggttgagcggcctgcgctgtccttcctcggtgaaacaacacccggcaccttccttgaatgcttgaccccggacatgatggaagacgggttcatgtctcgcttcctcgtggtctcctacaaaggcctcaagcccgagccgaacgaggttcgcgtctatgacctcgaacccgatgatctggccgcgtggaaaggactgctgtttcaagcggtaaagtatcaaagcccaatcaacacgccgcccgcgtgcatagtcagtcctacgccggacgcctatgacaagctcaagcggtttgaattgcagtgcattgagagcgtgaatgcgaccgacgacgaagcggagcggcaggtatggaaccgcgcacctctcaaggccatgaagattgcatgcttgcttgcggtggctgataacttcgcaatgcccacggtcaatatcgggcacgtcgcgtgggcgttgagtcttgttcgggcggacatcgatgtattccagtcacgccaaaagagcggcgacattggcaccgatgacaacgcacggttcatgaagatggtggcgatcctgcgcgactacctgacgacccctgtgaaggccagttacaaggtgccggaagagatgcgccagaacagcattgtcccgcattcctatattcagattcgcatcggcaagaacttggcctgcttcaacagttaccggcaagggcagaagatggcgattgaccacactattcgtagcctcatggacggcgggtatttgaaggaggtcgaaaagctcaaagtggccgaggcctacaactaccacggacgagcctacagaatcctgcgcctgccgaactga

SEQ ID NO: 536625 - DNA, 249 bp, Stenotrophomonas maltophilia
atggatccgcgcgaaaaagccaaaatgctcgcctatgtactctggaacgagttcaacgcaaaacaggtcaatattgcgaaggtacttaatgtctccgggccgactattagcctttggctcaaagaaatgcggtacagggccgagattcatagtctgacgcaggaactgcaggaggttcggatgattgcgcaggggcttcaagcccaaggtctcatcgaacaccgtcagacattcgacgttttggattga

SEQ ID NO: 536626 - DNA, 282 bp, Stenotrophomonas maltophilia
atggtggactacttcgactcgctgggaccagaagttgtccggcatgccggtcgttgcgtaatcgatatcgaggctgcgattcagtcgacacgtaacatgaaatcgctgccgcgcgactccacgctcggcatggacggtactcgagaaatctttatcaacgcgtacatgtcgattgacgacgcacgcatcgcattcgcgacgttggtttatggagaagtggagagcttctcgccgcccattgaggtcgtaatggcgcgcgcagagctgaacgctaccgcgtga

SEQ ID NO: 536627 - DNA, 207 bp, Stenotrophomonas maltophilia
gtgcaacgcggtctgccgacgccctaccgcgccatatggttggccgagaagctgtccgccttccaagacttcaccctgccctcgttccaggccatcaaagacgtcgtggtaccgcatgaggaggaaatcgcgtcgccgctgtgggaggccaaggtccgcaactgtcagcgcacctgcaatttcagcttcacaggggtgcagtggtga

SEQ ID NO: 536628 - DNA, 270 bp, Stenotrophomonas maltophilia
atgaggttgccacgggacggcgtgacggctgagctgaggatggatctgccgatcccgcagctgggcatcgttccaactgccgccgcgctctgtgcgatccgcatcgccttgtccccgaactggatgctgattacagaggcgccgcaggacggcgtaaggctgatgttgtgggactcagtgagcaagcggccggtgctcggcagctggtggggcgataacctcaggatcacgcactatgcggccgagccggtcggaccggagtttgactga

SEQ ID NO: 536629 - DNA, 621 bp, Stenotrophomonas maltophilia
gtggcggacccaatcaactactgcagctggctcgctagctcgatctgcatgacgcaaagcgaatgggcgacctggacccaagcaggattgactgttgggacctttgcgtttgccatgtggcgccagaaggtagcaagcgacaatgccgccaaagaaaaagccgaatctaacgaagagctgagggcggagcggcaaaaaagcgctttggagcggaagaccgccgccgatttgctgcagcaggaaaagaccgcgaatgcagcgacaagagctcgcgccattgcagtctctatgcggattgagatgaccggcttcctctccgttgtgtctacaatccatcttcgagacaacctgaaaagccctgcgacaacattcgcggagtatggcgcacaccttggcatcagacaccgtgcgatggacgccctggacctgggcgatgcaattcatcctgtgctggacgtcatttcaggggctcaaaccgtctacgggtatctggctacttgcagagctcaggagaccttcgaggagaacgactacaaatttttcgagtcgtgctcggagagtctgatgccgttggctaaggctgccgagaaggccattgaaagtctcatcaggcgtgagtga

SEQ ID NO: 536630 - DNA, 609 bp, Stenotrophomonas maltophilia
atggtggcagctctgcggccgtcacttacggcgccaagccccgcccctccgcacaccgtgcatggcaccagcagctccccaagcatcgcctggcccctgccctcgcaggccgcgcagtgcgggcgcttggcgatctcgccgatcaccgccgacgccagcgtcggcaacgactcaagggtgttgatcggccagcactgcgccctcacccgacccagccactgctgggccgcatcccggttagcccgcggctccgccgtcgccgcgccgccccagccgatgcacacctcggccagaccaagatccgtccgggcccccgccagccggcgctgctgctgccgctgcagctccagcgtcaccagcgcgatcaccgcgtcccgcagcttgtgccggcgcagcgcggcgccgccgtctggccaccagcactcctccagcagctcccgacccagcccagcccggcccggccagcaccatccccggcgccgcggcaatgtcctggttcgtcaggtccggcttgccgccgccccggccgatatcgaacttcaccgtcgtcggccccagccgccccatcgacgcgcgtggattcatgcccattcccctgtcgttgattga

SEQ ID NO: 536631 - DNA, 849 bp, Stenotrophomonas maltophilia
atggacacaaagtttaagcgccgagcgctggctgtagttatgttgggtggggccctgtgggtgttcgtgcgtaggccatttgttgttcttgcgttctgtgcggcgctttactttaaggccgagagttggcttggagttcggccgctgagcgcgttagaaatcctgcaagtattgtcaggtgcccctgaggtagctgtggctggcgctggtgtgctggtggcgatggcgtcagtaatcgcgttccgaaacgtcaagcgcctagacttggagctggctgccgctgcgtcgatatctgttgtcatccgggacactggggcgctcctagtccggaatcgcctgtactgcgagcatttgctggaggcacgagatctatacttcgcgtgcttcgatggtgaaacggcatcgtttgcagagaggacatccgcgcgcagggatcgggatgtctcgtgggcatgtcttcttgatactaccgaccaagctcgaaaggatcgcgccgagatatgggtcctcgtaagaaggatcattgacctgaatgatcagcatgggccgatcattcgaaccagtattatcgtaccgtggctcttggagagggcccaggaaaaccttgaggttctggctgcggcgacggtttttgtcaccccggagagggatagcaaaatcaccgaattcatgccggctttctttcttaacggagtcaaagatgccgctgattatctgtgtgtagacgacaagcatcggctgaaggtacttgcataccttggcggggcggcctcaattggctccacgtcagtggcccctgtgtcgctagtcactgctgtccggatgttcgccaagatatggaggatctag

SEQ ID NO: 536632 - DNA, 198 bp, Stenotrophomonas maltophilia
atgattctgaccgcctcgacaatccagcaggctgtcggctgcagtgtcgcagtcgccgccccatgggtgcagcccctgaccgaggcctgcacggcgttcggcatcagcaccccggcgctcttgttcaaatcggacgcgacgccgatgaccgcgcccacgcctgccaagccgtcattgcagcagaccgtgccgaggtga

SEQ ID NO: 536633 - DNA, 189 bp, Stenotrophomonas maltophilia
atgccttctggcgatgtattccttagcgcaaccaaggatggacttgaaatatcaattgatttcacggagcgtgaagcagaggcgctaaacacagacgccgaacttaaggccgagctgagcgaaattttcaagaagaaagcgcgatacttgggaaagctcgacatcgttccttttgacatcccattttaa

SEQ ID NO: 536634 - DNA, 282 bp, Stenotrophomonas maltophilia
atggcgttcgtcttgctgacgggcataggcaacttgcttgggctccccaaacgcctctcggtgggcatcgagcaagcgatcaaccgcgtccacgtccccgcgggcatggagcgattcggtgtaaagcgcttgaagcaacgaatcacgctcttgatgagcttcttcacccgtgccttcgccctggaacaacccgtcgtggcgaaggcgggcgtcgacggggtctgggcgaaacctgccgtggctggtcctcatgctcgcctccgggccagcccgctgccgtga

SEQ ID NO: 536635 - DNA, 5403 bp, Stenotrophomonas maltophilia
atggagaatgagatcattgccctccctgcaggaagcagggaatgtcgcgctgtgttccgaggccctcctgatgaagtgctgcgacaggtacttgcagagctttctagcgcgcaggccactctgactgcgcgcacctcagatggactagaagttcagtatccggcagtgctacaggtcgataagctcttggccggcattccggaggctcgcgcagaccgctcaggccaaatgttgttccatagccttgccggcttgcgcaatgatccaagcgttggaattttcttaaccttggtgccgccaggtgcccaagcaagcgatacacacgagtcaacgcgcaagacattcggtgtaggctcagtggcaaatgagggtggggcacccatctcagtgtggtggcaggatgcattcatacagcacctagtccatgagggacttggtgacgaggaagatgcacagttggatcaagccaagaggttgttgttcgaagccgtagtggccgcagacgctgctaatcagcacgaagttagtcgccgtggcccttgggcagtcctgtctaggctctatgcgctgagggactctggcctggatcttgactcccgcgtctgtcttgcagcgggtttcccgccctcagccgaccatcgcatcgattccgagcgcaagctcggggtccataggtcgttggttgaaaagtttgaaagagtgaatattggcgcaggtactggtcaactgagagagcaggcggcacgggttggcgtccggcagtcggatgtcgatggctttgctacccaaatacgaaagtgcgacgtagtcacgagcctcagccgttccatgtcgtactactatgcgccggaagacgttgcgcatccaccgggttggtggcgacaactgacagttcaggcatgggatctcctcctcgaggacgacttaacacaagccaccttagagatcggcattgagtgcacaaacccactggccttccagatgaaggggatcgtgcctgtggtccttggcgcagcgcagatccgaatccagctgccagatggcagcgacggacgcgttcaagtgactcgcgaagccccgggaggcgccgctaaccggcgccagtgggtgcttccggcggaggacggagccatggagttcactgatgactccatccccgaacataagactcctattcgatatgtcgccgagcttcttgactctggaactgcgaagaaggagtccacgaaactggtatccctaggatcttgggagccgggggtgatcgtctgctctcgcacggcgatcaagggtaagttgccgaaacagattgccggcaagtacatcgaaaccacgctggaaatgtctggtgccgggcgccactatctggacctgtatgttcgtccagggtttgagattgcctcggatatggcatctgtttcgggcgacgacgaggagctcctgcctgcccaggtgaggcgcgtagccgatggtgaatacggtatagaggttgaggcagggcctgagcgccattacgaagttcagattacccaaccgggattgaagaagacgggcatcctacgaatcggcctctttgctgaagagggcgatatggagcagtgcggaacgtactttgagtactatctggccagaaatgctaggcgggagggatcaaggatcccgcgggcggtgcaggtcaacagccactcacgtagcgcccagttgcaagggtgggcgctgacgcagggggtgatcgaccggtcctactatccctttgtcgttgcgccagattacgcgaatcaatggcatcgtcgtgattgggaaagccctgaagacgtgatcttctcctctggccgatttctaagtgatccgcgtcctggaatggacgagatgcggccgcctcaggattttctccatgcaaggcgatcgattgcctctcgaattaggggggcggatggttctgacctaatagagtccaccgacctaggtcagctgatggctagcgacaaagagttcgaagcgttagtcgagctttacgttaggtcatacctgagctggatctctgcctcaccagaggtcgcatgttggtgtgacctcggcctcgtaatggaacttgagagagatggcgaaagcttcgagcaagttcccaacgcgatcctcgtttccccattgcatcccgtaaggcttgcctggcagtgtctcgcccagcgcacattgttttactcttcccgaaagttgccctgtccggcagcgagtatcctcgatccagactgtgtgccggatacaattgccctgccgctccgcgacgcaacaggaagcgtggatgaggtggtttacttttcagtggagtgtagttcagattactggggggttctctggaacacgcgtcgtcttgataggctgggtctcatcggggggggcgccccgctggatcgtgaaatgggccttctggttggtgggatatccagcggcttcagcgtctcgcaggtgcatcgcgcaatagacgatgtctgcgagatgttggttgcgaagcctgtcataggcgtgctggtgtctagttcctccggtcagaacaacgcctgtaacgaggggatactctcctgggggcgcgatcgatactcgcctgcagatacgacggaaagaaactctcgcacctttggtgcgggcgagattcatatcttcgatgaaagagcagaagatgcacgccctggtgatgcagaaatatctaatctagccgaagatacgagcaacgcagtccagtggtatgcaggggtcggtcaggcgggttcccacgaccttgccatcatcgcccagcttgagacgtcaaaccaaggtgctcagcagacaaagcagacctcaccactcggctttggtggcctcgtgcgctctcgaatccgagagcaacagtcggcgagcaatggtcgattcctgagcgagtcaagagttgcccgcgtaccttctcccgtaggcgacgggcttgccgacaacctcgctagcgccattgcggcattggaagggctgtcggactcgcccgttggatacctctttgcgccgagcgtgggagtggtgaagaggtcgctagagaaggctgagtttgcagccgtctcctcttctgcagtcgacccagcatgcttcttgggaagttggctagaggacacctacctttgggactacgaacttccgtcgtactccggcaggtctggagacagtaacggttattacctcctttcacagatcaaggagcttgatattgaagtgatgaagatcgtccttcaaagactccctggtggaggtgatctttcagatgagtctctaaaggaaatcgtccaagaggttgcgcgaaggggaattccgacggtgcgcgggctatctaccggtaactcgggtgccgctggcgatcttgggctcttcatcgcaacacgacttcttcaagattgcttcagaacctcaggtcttcggcgcggtctgctttctccctgggaagaggttgatggcgagcacctgatcacgttagtagttcccgtcgatccgttccagcgctaccttgatgatctggcaaaggcgataaagaagcctgccctgcatcgtccagatctcctgatcgtggcgatctctgtacgaaactccgaagttaaatgtaagttgacgcccgttgaagtcaagaaccgtagcggctcttcgcctatgtcggccaaagagcgaattgcggcacttgagcaggcccagtctctgtcctcgctattgctctcaatggagaagatatattcagagagcgcggatatgctcatgtggcgactggcccatggcaatctggtgtcagccattgttgagtatggattccgcgtttacagccagcaacttaaggagaagggcaagtcgtcggcctgggcagagttgcatgcgagagtcatgcaggagatccactcttgctcgatcgtgcttcaggttgaccacagcggtcgtttgatcgtaattgatggttgcagcgagagccgcgcttgtgacacagatggcgactctttctcagaaacaatcgagatttgccagagagatgcttcgctcatcgtctgcggagacgccagcggactttacgacgggatcaaagcgaagatcggctcctgggggttgatgcccagagacaccgaggggctgacagccagagtcgagactgatgtcagttctgctgcgatcgactcattcgtaccagatctcgaggcagtcggtgacgagtcgtcattgcgagttgagcgcgcaattggagagaccgagtctcacgccgatgtgcagtcttcgcagacagggctcatccttcgagtgggggaagtgcttgattcattccaaactagagttcgacacctgaacctaggtgacactgccctgaatcagctcaacatgggcgtcgttggcgatcttgggaccgggaagacacagctgctgcagtcgctgatctatcagatcgcctcagggcgtgacgggaaccgggatgtgcctcctaacgttctcatctttgattataaaagggattacagttctccggaatttgttgaggcgaccggcgctcgtgtagttcgtccgcagagaattccactaaatatttttgacttgactgggtcgcctcaatcagtagcgccttggttggatcgttatcgcttcttctctgatgctctcgagaagatctactcaggcattggggctgtgcagagagagcggttgaaggccgcaatcaagcttgcctactccgtgcgcggggatgggagttacccaacgatctacgatgttcatgcgaactatcaggcatccctcaacggcggggcagattcggtcaccggaatccttggtgacatggtcgacatggaactcttcgatgacggctccggaaaaatctctagtccaagagacttcctcagtggtgtcgttgtcattgcgcttgacgagcttggccaggatgaccgaactaagaacatgcttgttgcgatgatgctcaatttgttctacgagaacatgcttaagattccaaagcgaccattcgtaggagtggatccgaagctccgcgtcgtggactcaatgctgctcgtcgacgaggctgacaacatcatgaagtatgagttcgacgtcctgagaaagctcttattgcagggccgagagttcggcgtcgggattattctggcctcgcagtatctaagccacttcaaaacgggtggtacggactaccgggagccgcttctgacttggttcctccacaaggtgccaaacctcaaagtgcaggagcttagtgcactagggctgactgagcagagcggactgcagtccatgtcagagaggataaagtcccttaatgtccatgagtgcatgtacaagactcatgatgccggcggagagttcatcgtgggagcgcctttctatcgccgcggcgagtggttgtga

SEQ ID NO: 536636 - DNA, 1479 bp, Stenotrophomonas maltophilia
atggaagctccctggaaaaagcagcattcttcattcagctcttcattctttagcgtctatcgagcgcctgagttctctacgggcgaggttgtactgtcgtcgctgtaccgcgcttccggatttgaaagcgtttccgaagcgaaggtgaaatctcagggagacaccttttacaaagcagctgaacgcgaccggcggaagagtagcgtcactagcaatatctcgcctgagacctggaaaactgttctgaataggcttgttcagagtccaaaggtggcgcaacagtctgccaagcgattcatgtccctgtctccaatagttccagacatttcactctattccggcgccgcgcggcttcaggggaatccctggaacccaggggagctcgtgaagagaatggttcagctcggatcgccatcagaggcggcagcggcggcgctttgggggcggctgcacagtgcactctccgtaaactacgacgatgacatctgggcgcgatggcttcagggcgagtttgaagtccgccgcgaaattggtgccagatgggcgcccagcttgcttaccccattaggagttctcggtgaggatcgcgcatccttcgcgtatccagccaaacagttcattgcagacctagatgggatcatctccgcaaagtcatccatgaccagacgtcagtggattagcctgttggaggcggttcttagaataggatctgtcagtcatatcctctggatatgtgatgtaactgatcgagtgtggagacgagttagacagattctcgaggatccgaatagcccagttccagaaaaggacgatgttctcgctgaaacgctctttggagtcaagaagcggatgctgtcatttggacatccggcaattccagccctccgtgattacgcttccaagtacctggccgcgcggcttgggctcaattgcgtgctgggggcccttgtggatgcagggagcaccgcagggactctgcgcacgattgcagaggttagagaattcctaaacctagtgcacaaggagcgggactcactagtgcgcgtaaaggttctagaccgttggcatgatctccaagataaagaagttcgagcaatagcatgcaagaaaggcatcggctccaacctcatggaattcgcgcagtacacgttgggtcagcggcaaacgatggatgaagcgttgcgcggatatgaccaaggttacttccttcgaaagcgaggcgaggcccgcaactcaccttgggttcttggcttggggcccgcctccgtgcttgccatgacgcattgttgcttgcatgaggtcaatgggccgaggtctgttcagcgcctggccggacatctgtcttcctacggaattgagtttgatcttcagggcctgaatgacagcgaccttggtaggcagctgcgcatgctgggtctcgtgcttgatagcccagatgccgaaagcgggatgctattggtacctcctttcgcgccttga

SEQ ID NO: 536637 - DNA, 2082 bp, Stenotrophomonas maltophilia
atgaataagcatccggaagcgctgttcaattggtccggtgacaaagcgggaggggtgaagaagttattttacaaaggaagcggacgaccctctggtttagttataaagaccggcctcctagagcgactaagcctctgggccgacgttgtcgccaaggggattaatcaaggccctcgcgtaatatttttgatcgggggaccgggaaacggaaaaaccgaggccattgagtacacgattggaagattggacgaggcgttgggactcaacggtgagctaatcagcgagctcgaaggtctgtactcaggccgcatgggaggtcctggccgtctcgtgcgttcaatttccaccaaatttcctgcttctagtggtatccagtcaattgcggtcgtccaggacggctcagagtccgaacgtggtagcgccctgacaccggctgagcatctctatgaagatatctgctcacaactcagtgggcatgatgaagagctctacgttgcgtgcgtgaaccgaggtgttttggacgacgcgctgatgcttgcggcagatcgtggcgtaaagcccgtaggtgatttgcttaagcagattgtccaggccgtgtctctaaatgcagctagtcaatcttgctggccactggcgggcaatcctcgctttgcggtttggccgatggatgtggagtctctagttgaggaggtaggtagccgaaaagattcagcggcgcgccaaatcctcgccgcagcgactagagagactgattggccagaattcggcacctgtgccgcaggggagatgtgcccattctgcaatagcagaaagctgttggatgttgaagccaacagtgcagccctgattcgtgtccttcgatggttcgagctatcgagcggtaaaaggtggaattttcgggatctgttctcgatggtggctcacattctggctggcggcgcgagcgggaaactggccaactcctacagtccatgcgtctgggcggcatcgcagattgagcccaaggaaaagaacactgtgaagcgcgagatcaaggtcgcgcgcggtcttttcagagtagtggccgcgcagtaccagcatgcaatattcggagcttggcctatcgagcgtgcgggtgctctgaaagcagacctaagggacctgaagctaggtgatgacccggccctggctggtatgtatcaatttcttgcgctggacaagcgcaaggagacaacctcgacgcttcgttcgcagcttcaaggcatggtcacacatcttgaccccgcgagtgctagtccggaccttgtgctggagttgagcaagagcaagaccatccagttcaaggagattgaccgtctattcagtctctctgtccgcgggggcagggagatgctcagcaggcatcgatgcttctccccgccggagaatgagctgctcaagcttctagagcaagctgacgagaagctttcggatgaggtgacgaggaggcggaagtcaggtgctgcggaccgggtgcaggctgtggtgcggctaatcgcctgcaggattgcaaggcgttccattggtgtcaggcttggcatcaccaaggatgacaacgtcctcagggagttcagcactttgcttcgaggggatgagagcgcgcttcaagaggctaaacagaaggttgaggggctcctgaataaagagcatcggttccatgtgagcttgaacacgacatttggcgaaccactgccgccttctgagcggagggtcatgctcacgacgactgctcaaagggttaagcagatgtccttggaacatgacgatagccggcccgtgccgccggtcagattcctaagcgtgggcagcggagcatcgccacagccggtcgcacttacatacgagctattcaaagccaccatctccctgagaagtggaatggtgtctgcttctcttcctcgttcggtcgtagcgctactcgataccacgcgcgccaaacttgcagggatggtggttcgcgatagtgatttgttggatgaatgcgatgttcggctaggactgagggatgagatagtcagtcagaatttcggaaaattcgtcgttagaagggggggcgcgtcttga

SEQ ID NO: 536638 - DNA, 2031 bp, Stenotrophomonas maltophilia
atgtcccgatgtgtcgcagtcaatgagattttgctgaggcagaatcgccgctcatccagaaacatcgtgattccagtgaagaatcctaatggacactctcaccgccgcgcaaagaagctaccgaatgtcactcattcggtccaaaaacaccaagccggagctgctggtgcgcaaggcggtttgggctgctggcttccgataccgtctccacgtgaaggggctacccggaaagccagacctggtgtttcccgggctcaggacggttgtattcgtgcacggctgctactggcacgcgcattcttgccagaaagggaggattcccgggcagaactcagcaatgtggagcgagaagttcagcgcaaacaaggccagagatgcccgaaacaccaggcgactgaggcgggagggatggtccgtgctgacagtttgggagtgccagttgggtgtggagggggcaaggtcgtcggccatccagggccttctatctgcgctaaggcgcaaaagggatgggcggcagtagcgcggctgcgttggcatccccgaggtgcttccatcatgcggggaagagctgataacctggtagccgaatcccgccggcgccctggggaggcaggaggcggcacattcgccccttgcgtccgcggtgcgttggctgacagttctctgagccagcccatggaaaacctgcactctccttcttccccaacattcattgatctcttctcgggctgtggcggtctgtctctcggactctcacaggctggatggcaaggccttttcgcgattgagcgcgcgactgacgccttcgagacgttccgtgccaattttctcaagcccgagtcgcgctgcaagttcaaatggccggcatggctggaacagtctgcgcattctattgacgacgtgctgacggaccacgaattcgagcttgcaaagctcaatcgtaaggtggaccttatcgcaggtggtccaccctgtcagggtttctcctttgctggtcggcgaaacaatgcagatcccagaaacaaaatgttccagcgttacgtcacctttgtgaaattgattgagcctaagttcttggttttagagaatgttcctggaatgaacattgcccacactaggcacgggaacaaggcagctaggcgcggtgagacgtactacgacaagctaagtagagcattggtcgagcttggatacgccgtggagcctatgatcctcgacgcggccgacttcggcgtcccgcagcatcgtgaacgattggtggtgatcggcatgcgtaacgacgtagccaagtccttcccggccggttgcgttagtttgttcaacaaaattaattccgtcggaaaggcgcagcttgcagagcttgggggcggcaagctcgtcggtgccaagcaggcgctgtcagacttggctgtcgggtcagggcgagctagggaacagaacacgatcgagtataccggcgcgggcgcaagggcgggttatgtccagaaaagatacacgggtcctgatgcaactccctaccaattactaatgaacaagggcgtcgaccagacgcaaatggatagcatgcggctcgcaaggcatcgcgaggacgtcgaagatcgctttcgcgacatcttagccacgagcagacgcggtgtgaacttgagcttggcagatcgtgagcgattcggcatgttgaaacaccggaccgtgccaatgtcgccgagcgtccctgcacccacgctaaccaccctgcccgatgacataattcattacagtgatccgcggatactcactgtcagagagtgtgcgcggcttcagtcatttcctgactggttcttgttcgaaggaaagtacacgactggtggcgcacgcagaaagtcggagtgtccgcgctacactcaggtgggaaatgcggtcccaccgcttcttgcccaagctattggtagtggaatactggagtcctggcgcgcatctggcgcgaaggtgaatagcggtgttggacggaaggtggtaattaagaaaaaagacgcagctgctatgcgattgtag

SEQ ID NO: 536639 - DNA, 945 bp, Stenotrophomonas maltophilia
atgctgattaacgtgcgtgatatgtggtctgaaaacgtcgctctaatgcatgaaatatacgtaagtaatataattaacactgaggcaaagaggcgagctccttgggggagtaagtttttggctgaatttgttggcaggaatagttccgccataaccagcggcggtgtcgacgaaataagggcatcaatacttgacttcgaggagtgctgcaaggcgcgagatgttgaatggaggcgacgttcaatcaaaaaatttataagagttcttgattacgatcgcttttcgcgagtagctggaaatggctggggcgcgtacgaactttgctctagggcaaagtacaaggtgtgcccgtactgtcaacaatgtttcgctatgactatcgtgcgtgatgacggttctaggtgttttaggccgaccttagatcatttttactctaagagtgagtatccttttctctcgctgtcattgtataacttaattcccagttgctatacctgtaatagctctcttaagggggttagggattttaataaaaataagcatctgcatccttttgaaagtgacgagaaaataaaattttctgttgatatttctgattaccttgaggggaaacgcacgggctactctgcgtggaagatgagcgtccttcatgatgatctgtgtaaaatgcagcgcaattcaatgagaacctttgcgatcaaggagcgatatgccttcgtggctccgcttctcgatcgattctgcgagcgggtataccagcactacttcgttggatctggtcggtatgagcaggtgatgcggggcaccctattcgatccagagtcggtctcccgtctagattttgattcatcaaactataaaaacgagttgtttgggaaggtgaaaatggatgtccttgaggagttcaagaaggctgccgcaaaatttggtgctagacgggcgtag

SEQ ID NO: 536640 - DNA, 1380 bp, Stenotrophomonas maltophilia
gtgatatattcgttcatacatggggagcggatagttaatctgcttccaatttcggtgcgtgaaggcagggcgccgcacatctataaatcagattcaatgactctgattgttggtccaaatgattctggcaaaacagagttgttggctagtttgtgccatagcatcgcgcggcgtgaatcgaccaagtttgaaattgaagggcgcattgaggatgtcgggattgtatattttagcccggcgccatttactaggttgaggttccctaaggccaaccgtagggtcaaggtgatttctcagcgccatgcctctcccgtcacccaggacatactagataatctcaaggaaaaattcggattttctggttcggttaagttgaggttgaggtatgggcccgaggacggggtcagggagttgctttcgatggcaatggaaatcccttctaagattcctcttttctctgagttagagatagcaacacttaactatcagaaagcttcatcgatatggaggtctgaagatggcagtggtagtggcggtaacagggaaaggcagtctgcgatggttgctgctcagcgagctctgaaagatgaaatcgaggatttggtgagagccagactcgggcctaactatcagcattttttgattgcacttgcgttcctcgtaaagagcggggtcgcgaaaaggcttcagatcaaatacttttggaattctctggcgggcaagtcttgggatgccaatctgttggctctggttgatattattggcgatatctccaccaaattcagtctagatcagcttgtctctggggttgagattgacagggtgccgagtgacctaggtattgaagaggttgatgggctggttactatcggtgtcgatggtctaagctccggcgcagaggcgcttgtcactcagttcaccgcgatatcttcagcagtagacgagctgtctttggcgggagcttcatcaatcatagttttgatcgatgaaggggatgcatttctccacttggcctggcagcagcgctatataaaagagatagatcggtttgcccgggctatatgcccgaaatgggcagaaattcagctcgtagttgcgacacattcgccagtgctaatgtcggattttccgcgcgattacatactcaggctgtcaaaagagaaagatgaggtttgtccgtctcctttttcaagctttgcagcgcctttggaaaagatagtcgagaccgcagcgggcgcaggctcaatagggcaacttgccgctgacgtaattcgcgctcagctcagtagaggcgagggtgcggatactcggatagttgagtggattgacgatccgttgcttaggcgatacttgctagaaaaggtcggtcatgctgattaa

SEQ ID NO: 536641 - DNA, 294 bp, Stenotrophomonas maltophilia
ttggtccacttgagccgatataaagaatcggaaaacggccgaaaactgatcgatatgcaaggaacagcattcgacaaggactgcgccccacagctgatcaagttcttgatgaaacaaggacctcccgtggcacacatcgacctggacttcataggacggggcggcgagaaccccatccgtagcgtcatagtcggccccaagaatcaaagcttgactacttcaatctctatcatgctggagacgcttgggctgtctggcgtagacgtggtgaagtccaacgcgtcttatcgatga

SEQ ID NO: 536642 - DNA, 309 bp, Stenotrophomonas maltophilia
atggatcgcagcaggacgaaagacttggacagcggcgccggcagtcgaccggtcactcactctggagtgatgctgggggctgcttacgtcatcgaactcaacgtgtggcccgatggaacgactatcgagaacgtgaaggtcaccagtggcgacaaggagcgaaatgcgttgtactccggctatgagttcatcgatgaagaggctgcccttgccgaagcgctcgagactgcaaagacacttgctggaagcgaggaacggcgtcgtgaaccggtcggagtgaagtccatttggggagttccgacggtctga

SEQ ID NO: 536643 - DNA, 255 bp, Stenotrophomonas maltophilia
atggccgcaacctggccgcaacctttgtttagccagcgtgaggctgagcctcagtggccggtcacatcgatcgcgcaggtcgtggacctgggtggggtgcgcgaagccctgcaggtcgctaagggacaggcgatcaactgcgcatctatcgactgctactcccgcgaggaacttgctaccagtggccgagcaatgaggcagcagtttgccgaagctctggccctgatcgacagccaggcggtgggcaatggctag

SEQ ID NO: 536644 - DNA, 984 bp, Stenotrophomonas maltophilia
atgaggcacactgttccgtgcctgctccgtggttcctatgtcacccggtgttatcctctttctcgctgtgctgttgcaaccgctcaaatgaaaggaaatattgtgagatttgtcaggatgattctggctgcagctgcagccctaggtgcttcccccgcgcttgctgcccaaccggtacattgccctagttgcgttaccgacgctgattttcgtcaaagagctgtcttggaagaggcagtgaccaatgctggtggaacgttctgggtttacaatctcggcgcgggcacggtgcagaagtggtccatataccgttcaatcggcggtggcggcggcggtacacctcgggcagtgcgtgcggtgactaccgcagcaagctccggaagggctacgcagctgccagtggagccatatgtgcaggcagaggtccggaaagggcaggcggtctacgtaaagggaggtagtagcctgaggccgctgtacaacgttcccgtaggtaagctgaatgtgcccgccgccattggtaaatccgttaccgatgtcatgttggacgctaatctgaaggcgcagctggagtctaagctgggcgacacagatgtagtagggtctatcatcggagatagcttgttgagcgctatcgttgatgtcgctcagatggcgaccaacgcgcttgggctgaaggagggaacttacgtcaacttccgtttggttatggaagatggaagctacctggacttccatctgtctgtgcaaaagaccacggctgatgctcaggaagacaccgctcgtaccgcaactggtcagttggtgccagagaaccttcagcaattaaatggtaattggtcgactaatggtgccgataatttggatcggcttgcgagctacttcgagaagcttggcgcggtcgtcgtgaccgaaggcaatggtggattcacgaacgccatctcctgctcaaacggccgttgtataaggcagaagatcaagtag

SEQ ID NO: 536645 - DNA, 123 bp, Stenotrophomonas maltophilia
atgcattccctggccggcgtcgcactcgcgccggcggcgttgttgtgcctgcgccgcgccgcgcgcgacaaggtttggtacatagcggtacgtgcgtggggttacccagcgctgcgttgctga

SEQ ID NO: 536646 - DNA, 2520 bp, Stenotrophomonas maltophilia
atgaaatcaggagcaggggcggctgcccgtttgtttgccaaggacctggcggcctcgtggacgtacctgccgattgcgctgttggcctgtgggataatggccgcggtggcgtggatcggcttcggattcacctacggcgccagagcgatcactgccaccgggctgctgctggggtgtgcgctgtggttgctgggccctggcctgcgcaaccgctggtggggtgcggcgctggcggccgggctggccagcctgctgctggtcggcaacgccgccaaggtggcaatgctgcacgtcccgctgtccattgcagatgcccaggcgctaccaaccctgcttgccaccctgtctggtcgccccctgctgctggcgacggtcctcattgccgtggctgtcctgctgccgctggccagcctccgtccgcgctggcgcagcctgctgacgctggccgcgacaaccgcctttgtcgccctgctggccaccacggccgacctgctgcgcccgatttcccagaccctgctgccggtgggaatcgaagaactgaagatgcccaatggcgagatcgtggaactgccgggccgcgaagatcagatcagtctgctgcagatgcgcgggccgctgctgtacctgcttgaagactggcgggtgatgcgcgaggacatccgcaaggttcccagcgccgccgagatcgatgcgctggcgctgcaggcatggcgcccgggcagtatcgacgtgcatcgcaacgtacatgtcgtgctgctcgaaagcgtctgggacatcaccctcctggaccgctaccgcagctcccgcagcccgctcgacccacgcttcctggcattgtgggaaagcgccgggcggccgtacgtgctgtccccggaaatgggcggcgcgaccgccaacgccgaattcgaagcgctgtgtggcctgcccgccccgcgcaactcggtcgcgttcgtcaatctgatgcgcaatccctcgccgtgcctgcctgcaatgctggcgcgcttgggttaccgcacggtggccagccacgccaacctcgccagcaactggaaccgggtacgcgcctacgacaatgccggcttcgatctgtatcgaccgatcagcgctttcgaactggatgatctggaaggcgggctgctggccgatggttcgttcttccggcagaacctgcagtatctggatgagaatcgggccgagggcccgctgttcaattacctggtgtctctgtcctcgcactgggggtttgtgcgcaataccgaacgccgccccgatctggtgacgatcagcccggccgatgcgccggtgctgcaggcctacgccaatgcagtggcctacaccaccaaggcgttcatggactgggccgaagccatcctggtccgcgatccggacgcgctgatcattgccttcggcgatcactcgccatcgctcgacgtggatccggacccctacaccgccgtgaacagtgctgacaagtcagccttcgacaacccggcaacccggcgccgggtcggcatcagccgcacaccgctgttgatcctcgacggcagccgcggtgccctgcgcacgggcactgacataccgatgtacgaactgcccggcctgatcggccagctgctgggcaacgcggccctgctgccacagtcggcccagcgtggcccgatgacactgcgcccgttccgtgggcacctgcttgccggcaacgacggcagctggaccgactgcgccggccgcgacagtgcacctcgcacccccacctgcaatgccgcctggaagcagttcgaccagttgcgcgccctgcgccaggacatcgtcctcggtaatggccactacctgcgcgcgcagcatgccaaggcgttgagcgtaccccgcctggttccgatggcgctggaagcacggcatgccgactgtgagttcgaggtcgaacagtggggcccgcagcaggccatgccgggacagggattcaacctgcagcccgacggctccagcgccatgtggtttgcgatgaagcatctgcgcggcacgccccaggtgaaactgggcactgtcgtcggtgaggccaacgcgggcgaacagctgctgacagccgccttcgcccccgccgccatcgccggccttgccggcccgacgccggtcaccctgacctgccccggccagccgccggtgcaggtgggcatgttcgacgtttcccccggcccgcaaccggctccgcctacggccgccgacgcgtgcagcttcagcgtcgaccaatggggcccgcgtacgggcaccgcagcacagggcttcaatctgcagcccgacggcagcagcggtgtgtggatcaccatgaagcagctgcagggtcagccgcaggtgcgtatcggcaccgccaccggtgccagcgcgtatgggaatctgctggtcactgcggccttcagcgatcccgcgctgttcgccaagccagccgcattgcaggtatcgatcgcctgcccggggcagaccgccgtgaaactgggcaccatccagcttgaggccaaccactga

SEQ ID NO: 536647 - DNA, 723 bp, Stenotrophomonas maltophilia
atgaaactccgcgccaggacgtggatatgcgcgctgctggccgtgtcggcggcgctgccggcatcggccgcggtgacgctgcagggcacgcgcatcgtgcacgatgccagcaagggccgcgacgtgacagtcagggcgagcaacgtgggcgagttgcccgcgatgacccaggtctggatcgatgacggcgacagccagtcgcgcccggagaacgtacgcacgccgttccggctgacaccggccgagccacggctgctgcagccgaagcagggccaggcatatcgcgtcacctacgcaccgcgcccgtcggaagcaccgctgccgaccgaccgcgaatcggtgttctatttcaacctgctggatattccacccaagcccagcgatgccagtggcaagaacctgctgcagttcgcggtgcgtacgcgggtgaagctgtttcatcgacccgccgggctgccgggcaatgcacgcgacgcagcagccacgctgcagtggactgccgatggtgatgcgctgcaggtacgcaacccgagcgcgtaccacgtgtcgttgagttcattgacgctggccgatggccgccgcgtggacgtggatatgatcgcgccgggggcacaggtacgctatgcgctgccgaaaggtgcagccatgccggcaacggtggcgttcaaatggctggatgattacggcacgccgcgcgatgccgaagcgcgcgttaagcggtag

SEQ ID NO: 536648 - DNA, 1467 bp, Stenotrophomonas maltophilia
atgccgcagctgcggcagttcattggggtgcgtcccttggacaaagctgggttgtcttggctggacacggtggccaccggagcagcccagaccaagcacactatcccggacatcgtgaacgtcctgcttgaagagctggtgcaccatcgctacgaacttcctggcttccgcaccttggaactggccgccatcggtgcccgcgagcgggtcaacctgggctactaccgcagtatcagccacgcgctgacgcccgccacgcgcacgctcatcgacgaactgctgcgcgcaccggaagggtccaggttcaccggctggcaatcactcaagcgcgagcccggccggcccaccaacaaggaagttcggttctatctgcagcacatccgcatgctgcagcagttggccgaccagctgcctcccattgatgtgccggtgcccaagctcaagcagttccgtgcgatggctcgggcctatgacgccagcgagctggccgaactggctccggacaagcgctatgcgctggccaccatcttcattcgcgcccagcatgccaagacactggatgatgcagccgagttgttcatcaagcaggtgcgcgggctggagaacacggcccagcagaaattgctggcctaccagctcgaacatgccaaacgggccgacttcctcatcggccagctcaaggaaatcctacaggcctatcagctcgacggcagcgatagtcagcgcgtggatgccatcgacaacagcctggaagcggaagtgtcgaccttgctggccgaatgcgaagaacatatggcctacgccgggaagaactacctgccattcatgctgcagccctatggcgcggtcaggccgctgctgttcaatgggctggagctgatgaaacttcgggcgaccagccacgacgccggcatggagccgctgatcgcagcggtgctctcgctgcgcaaccagcgccgtgagctgatcgaggtcgcctccctcggtttggacccggaaaaggactttgactggatgtccaagctctggcgtcagcacgtgttcggcaagcgggccagtgcagccggcgccggctggatgcaccgtaagtacttcgagctggccgtgctggtgcaggtcaaggacgaactgaagtccggagatctcttcattcccagcagcgaacggtttgatgactaccgtgagcagctggtcgatgaagccaccttggcccaggaactggaagcctacggccaggtgtcaggcctgcccaccgacgccgagtctttcgtggcgggattacgtgcacaactgacctccctggccgatgaggtcgacgcgcgtttcccggagaacgtacatgcggacatcctggatgggcgcctggtgctgcggaggggcaacgcgccgaagtctccagcgcgattaccaccgtggatcgcctcatcgccgaacggcttccagaatccagcatcgtcgatgtcctga

SEQ ID NO: 536649 - DNA, 261 bp, Stenotrophomonas maltophilia
gtgcgctttggcggcacgcccgatggcagcaccggcaacctggcactgaccgcggcgtcttctgcagccaatgttggcgtggccctgtacgacgctgcgggcaaccagcagaagatcggtgaggacccggccgtgtgggtgaccatcgccgccggtggcagcggccagctggactacagcgcgtggtacgcctcaccggcgcagaacgcgcaggcaggcaccgctaacgcttcgggcgacttcgtggtgctctacaagtaa

SEQ ID NO: 536650 - DNA, 714 bp, Stenotrophomonas maltophilia
atggcccttgccaccgaagcccaggagttcgttgaggcgacgcgcaacgcaatggcggaaggagctggcggcccgaggaccaagaagcgggtcgtggtcggaggactgctgtcatatgcgctggacattgcgtggtcgagctgccatctgttgcgtaccaagccgatggagacccacatcgcggtgctcacactctggagaccgctgtttgaaacctggtcacgcgcagcgttctttgcgcttgaagccactgaagatgagattgatgcattccgcgataagggtgaagtgccacgccgtccctggccctccagaccggacaagccacaagacatcaacccccgactgatcgccaggctcattggcccgaagctctgcccagatgatcccgaattgcttaacagacttgccgacgaagttaaggactggcatgccctggtgcacggcggcgccaaggttgtggacatctatgatggtggcgacacgctgcaatcgcaggtgagcccggacaacatggcgctcaaggtcggtcgtgtcgccgtcgtcgcgttcctgatcggaatgattgcgctcaatatgtcggtcgatgagggcaggcgtaacgaggtggagggcatagctgccaacctgggagccaagatccgagcgttccaggcccgctggccgcgtcatctgccggggggccagggcaaggaaacagaaagccgcccgtag

SEQ ID NO: 536651 - DNA, 450 bp, Stenotrophomonas maltophilia
atggcgttcgcggatgcggaaaagacactggttgctcagtatgtagaggccgagcagaagcacgcatatttcctgcttggcgcaactggtgccgccgtggggttcgtagtccaaaagctggatgggcaacggttcgatctacctggtagcgtgctgttgatcgcggctggctcgctgctgctgtcgcttctgtttggaataaggttcctcgaccacgtaaacaaggcgcgccacgctaacgttaaatggctgcaggcgcaggaggaactcaagccacagaacgcagagcagaagaaggaatacgacgcgttggtgagcgagttcgacgccaaaatcgacacagagaacgccaaggctggttcgtgcaaaaagtggcaattccgtactcttttcgtcggcgccctgcttcttgttgtgtggagagtgttcacaatgctggcagtctcctga

SEQ ID NO: 536652 - DNA, 189 bp, Stenotrophomonas maltophilia
atgcagacccaacaaaccgataccaactacacgtacaacgtccacgtcaagcgcagcaacaacaccgttgtgaatctaccgacgccaaccggtcggcggcacggccacctacaacctctacatcgaagacagcgacaactccgtcgcgaactttggaagcgctacaccaccctcgcagtatcgaactga

SEQ ID NO: 536653 - DNA, 330 bp, Stenotrophomonas maltophilia
atgcgccagcgccgacgcctgcaggtgatggcggcgatcccggtgggggcggtggaggtgacggcggcggtaccgatccgggcggcggggatggcggtggtgacaatggcggtggagacggcgacgggggaagcggcaaccccggaggtggggatggcggtagcggcggcggcgatggtgacggtgatggggatggcgacggtgatggtgacggcgatggcggcggcactggtcccgggccgggcccaggtcctggagagggagacggggacggccccggcgaagtcggtagcgatggcggccccttgtacgagcgggacaagaatctga

SEQ ID NO: 536654 - DNA, 723 bp, Stenotrophomonas maltophilia
atgcagccaagcgctcaggaatggcatgcattggcggtcaggcgatgcgccggctgccaaacgggtgggaacaggtgtcctcgcgctctggcggctggttacgctgtcgggagcagtgatccggggtgtaggggcagcgcccctacggaagcgcctcacacgcgctggcgaggcctcggccccgatattggcaggactgccgctggcggctcggcgtcagggccagccgtcgccaccgccgaccgctgtttgcgccggctaaccacgtcccgcagattgacgacagtggcaggacgatccttcgctactgcagcacgattgtttccacgtattgaactatcggactttggcgccgaccgcgcagcttccatcatccggcgccattcctgcgcttggcaggcggtgagcgacagccaggccagatcttcgggaagaagctcgcggccttcgggcgtgatcagacgatcaccgaggaaagaaaaaccggcccaagggccggtcaagtcgatacggtggtgcgggtcgaactcaatcatgccgcgatctcatccttggccggggactgagggcggaggcaagagccgagccagaggaccagccattgccacgcggagccaacaaaggcccagatccggcggatacgacatttcgcataatgtatattatgttctttggcttgagggccggcacgacccttggccagtccccgggctcctgctctga

SEQ ID NO: 536655 - DNA, 696 bp, Stenotrophomonas maltophilia
atgctgcgagctcatcgagggagagcttaccgcgtcgaacctgactggaacgtcacgaaggctaatgacgatcggttgcatgcagatgactgcgggatcgcagcagaatgcttacggatctttaacttccgcctaacgaatccgcgggggattcccgccaacggcgcagcccctcgtggctgggtcgcgaaatgcgcttcatgtgattgggtcggtcggggtgggttcgcgggacacgccgtaaacccgtccatgggggctcgatggcgccatccatggcgccaacggtcccgcgaacccaccccgaccgccccgacagttttcgggcacgtccagccacggaaaagaaaaaagaagatcaaaagcaaaagcagcctggctggccgctttttgaagagccgagcccatgttcggctcacgagcaagcgcagcgcgcgacccgcttctgctgttctttattctcttccgtggcctggcgcgcacggaaactgtcagcggccgggtgggtggcgctggcggggtatccgcggcatggatgccgcggctaagcccccatggatgggttcacggcgtccccgccagccccacccacccggccagcccccaggaagcaggcattccgcgaccaagccacgaggggctgcgccgttggctggaacctacggccaccagccacgcccgaaccgggcgaaatga

SEQ ID NO: 536656 - DNA, 234 bp, Stenotrophomonas maltophilia
atgcgggatgcaccagggcccactaggagaagcgctcgggacgccaagctgagaatcgcccggcgctccaagaggctcttgactactgactacgtgcgcgatggcgatgttctagtcgtttcccgcctcgaccgcatcgcgcgttcggtgctggacttggccaaaatcgctgaccgccttaaacgcaagaatgtcagccgactgttagtcgactcgcggtcgcctgcgggctag

SEQ ID NO: 536657 - DNA, 831 bp, Stenotrophomonas maltophilia
atgcggtggtcgctggacgcaaatgaaggcgcgtttcgatcggtgacgttgccgaccaaccctgttccttgggcagaaacagaaagcccccgcgagggccggggcgttctgttgatggacctgctcgccttacgtggagcgcgcctagaacgcggtcggaccgatctgaatcacgccatcatgggccaacgcgagacggatcttggttctgccacccgccgtgaccatttgggaaatctctcgcctatgcgccgattcatccccccacgaacagagacctttgcctgcgaaacttgcgctgacaatgcgattcccggcgggaacaggcagcgagacagactctccccgctgcagatgggctgccaaggtgccgtcgatatacagtgcaatcgggcacgccccaccaaccgcgccaacgtcgcgcgtaacaattacctgtccggaagcagtgtcaccgatcccattgaaggcgaaaacccgctcggcgggcaccggttgcgcctgttcggagctgatctggcgggttgcacagccggcaagaacgacgcacgcaatcagactcagcacgatcttcttcatgagatccgccgtttattgaaactgtgttgcccggtccagcgccgcaagcaatacaccttggcaatgttaaccccgaccaagcaggtacatgcccgcggttccatcggacgctggcgcgggccctgggccggcgccagcacagcccaaacaaaaagccccgaccaaaggccggggcttttctacaactggtgccggaaacaggagtcgaacctgcgacctacgcattacgaatgcgaacgattctcattttag

SEQ ID NO: 536658 - DNA, 147 bp, Stenotrophomonas maltophilia
atgcccccccagaaattcgcaccgctcacctatggggaaaaatcaacccttcttagtgacggagcgctctgctttgctaacgacacccgcacccgcacccgcatgctagaccactggcaacggcgaattaaggtacacgtcgtctag

SEQ ID NO: 536659 - DNA, 393 bp, Stenotrophomonas maltophilia
atgaaaaaaatgctgctggtactaatgttttttactattccgataattgcgcaagccgactgtacagttgacgttatgaacgatgatgttgggttgcaaatagaaaagcagttgtccgcagaggctgtcgttcaacttcttgtgcgctgcgatgaaccgaccaatggcgaactgtgggtcacagcccccgatggcaggtctctgatgggagcgggtgccggtagtgatttgcaaaccacagtttcaataaatggtcatccagtcgatcaacctttagctattcaggcggaccaggccgggacgcctattcccatccaattcaaagtaacgtctgccctttacccgcctgccggtgaatatcgcgaagatatttcattgagattggaatactaa

SEQ ID NO: 536660 - DNA, 1491 bp, Stenotrophomonas maltophilia
atgtccgtaaaaactatatatagcgacaaggaactggttgacttcatcgactccgcaacacccgaggagcttaaagactatttcaaagagaatataatatttcacaatatcaattcagagatctctgtaaacctggactgcggacttagcttcattgctagcccacttgcctactcattattttcagataagaccagcgccagccatgttcaagctctcattgattgtggggccacgctggataagctggagcttgagatacttcagttttatggtccagatatggatgaccacaatcaattttcatacaatccatttgaggaagcatcagcggataaggtggacgtgctcaaccgtgctattgaatggatcaatcgcaaatacactgacactgaggtctacgatctgatcacaaaggacaattcatcaagcattagcgactatttcggacgccatgatccgaatgaagaaatcacctgggagtatcccgaaaagaacttgaggtacgttggatctatttgcgggttggcagcttttgatgaaaaggtgaatgtgtatgccggatttgtccaaattttagacaagggcggtgatccgaatgtgctgtgccgcgtggaaaacatcgacaacccagaaaacgttgatgtattgacagtcacggagctgtgccactcggtcgataaaattaaccgtgccttggattatggtggtcttcctacgcagcatctattggaaggcgttctgtatggaataaaggacaaatctgcacatgaattgcacggtaatgaattgcatttttttaataagcagtttcaggcttcacgtgaacaggcatcagaaaacaggcgaagacgagatgaggcgtccgaaaatctgagattgctcatgccgctagaattgagacttgtgacggatcaccccgatatctttgaagcccatcatatgcatggaatggcaaacccgcaggccgttgccgagatgctgttgatgggccacgattctggcgtggtcaatgaagatgggcaaagtctgatgctaagttcgcttttaagcggaaagtttgaggtctttgatgtcttgcagcggtttggagttgagagtgggtccgaaggtgaacgccccatggatttggttgtgaagcattttgattgtgtgcgtgaggctcatgttcctggaggtgactttgaagactggcaaagatgcgaacgcgcgatcgcgcacttggtacaaacttccgaagatccgaccgcagatttggcctcctacttaaaaattggaaggttccctgatgctcacgaagtcgctcagttgattgatcgtggcgctgtaatgagtgacgaagcacagcgaaagtatatgtcccccgaaacgtatgccgttggagatgagaaacaaaaggtccaacaagcattgaaccgtcaacagcgggatgtgatcctggcagaagttggtgaggtgtacacaccgccaaccatgagacggaagatgtaa

SEQ ID NO: 536661 - DNA, 591 bp, Stenotrophomonas maltophilia
atgagcagaccaacagcaatcacgcctgtagatatattggtgaatcacattttctcaggcgcgatcggcaaggacgagattgagcatgagtgggaccgcatttgcgaccactacatcgccacagggctcgcctcagcggtggacggggagggcaaccatctactgcacatcctagctccttccaaccaaggccaagccattcaacgatgcataaacgcgggcgtcgatatcaacctgcaagccgagtggtccaacgccactccgctgcacacagcccttagcgttggcgcggaccaagcggttgaagttctggtggccgcaggcgcggatctgaccttgtgcgactgcatcggcaacaccccattgcacgcagcggcaatgtggggcgatctaaggacggttgccttacttgtgcaggcgggggcggacgcctgcgtacgaaacggagacgatatcaccccctcagagacgagcgtgtccgagtcagtccgcacttacctggaacacgctcaggcacaacagcaacgcgatcgattggcccaagctgtcgcagcggaggacagacctatatcaacacgtcgtcgaatgtaa

SEQ ID NO: 536662 - DNA, 882 bp, Stenotrophomonas maltophilia
atgggggtcactgagggacaaaagaagctaaatcaaaaatttattgaatgcatttcggacgttcgtgggacaactggatttgcgtttgagcgagcattgacatgtttggatgatggcgctgatgtaaacacagttgatcatcgtgggaagtcggccattcatttggttcttgagaagacctctcatcattatggcatttggtgtctgattgagaagggtgctgacatcaacatgattgaccagtatgggaatactccaatcattaaagcaaagatgtgcggtcgtaaatcttcatttgagatgctattggaggccggggctgatccaaccatcaaaaatcatgctggtaaacgtcactgtgattacagctttgatgggggcgttgatatataccttgagcggcttgagcgcgaatgcgacgaaatggctgcgcagatttttcgatgcatggttgatcgtgcttcatcgcactatgtacagtgtcaaaatccattttcactaatttcagatgaagttgatgaggcgactttgcagctgcgtggcgcggtgaaggatgttttggaaaattgttctgagtctgctctttggagtgttcgggcgtgcctttcgcaaggtggggatccaaacaagattaacaagctaacgattgtttccaataacggatttccgcgtgaacttataattcctatgattgatgcgggtcttgttctatcgcctcgtgaggtggaaaaatggattgagaaacaactcgttgttccataccgccaagctcgtgcggtcgtgtacgagcattccgtgaaatcaaatgtcacttcaatcagcgtgtggaaccaaaagaaaaatcataattttccaactaaacggtcggcaattggtagatga

SEQ ID NO: 536663 - DNA, 261 bp, Stenotrophomonas maltophilia
atgaaattacactacgcaaacaaacccgctcaaagcacgttcacccgctacgccttacgtgccgcgttgtacgcagccatcgcgttcaacatttatggagtcttctacgtgttttgcgtggaagagaacgacccgatgatctacgagcagactgttgtggctgcacaacccatccaaaaggccacccagcagatgcccgacgtttacggggagtatccactgtctggtagtgggaacacgattgacgagatcaaggagtga

SEQ ID NO: 536664 - DNA, 408 bp, Stenotrophomonas maltophilia
atgaaaacaataattcttacgctggcgcttatgctgtctgcagcttcggcgcaagccgcacacgttcttgcatccgatatcacaggcgtagttgtggacggtcagggcaagccgattgccggcgctgtggtgcgggcctaccaccacgacaccaacagactgattgaacgtcgaaccaacaacaaaggacgctaccacttcaacaatctgcgtccggacggtgagtacaccgtgtcgcacgctgctacgtcgtataccggccgtgtcctgttaggacagacgcaccgccaaaacttcgttggagagcccttgcgcgccgactcaccaagcgttctctactcctggatttggagagggccacgaagtgaacgacaaacaatcacatggttatccaataaggaggggtaa

SEQ ID NO: 536665 - DNA, 657 bp, Stenotrophomonas maltophilia
  misc_feature (417)..(424): n is a, c, g, or t
atgccgaccttggtcggcgctgtgggtttcgtgccaaccaaggttggcacctaccagagcgatacgtcggttgttgcaggggtagcgccggccgctggccggcaaccggtgttggtagatgccgaccttggtcggcgcggcgggtttcgtgccaaccaaggttggcacctaccagagcgatacgtcggttgttacaggggtagtgccggccgctggccggcaatcgccgttggtagatgccgaccttggtcggcgctgtgggtttgtgccaaccaaggttggcacctaccagagcgatacgttggttgttgcaggggtagtgccggccactggccggcaaccggtgttggtagatgccgaccttggtcggcgctgtgggtttcgtgccaaccaaggttggcacctaccagagcgatnnnnnnnngcgctgtgggtttcgtgccaaccaaggttggcacctaccagagcgatgcgtcggttgttgcaggggtagtgccggccgctggccggcaattgccgttggtagatgccgaccttggtcagcgccgcgggtttcgtgccaaccaaggttggcacctaccagagcgatgcgtcggttgttgcaggggtagtgccggccgctggccggcatttcccttgggcgaagaggatttctga

SEQ ID NO: 536666 - DNA, 360 bp, Stenotrophomonas maltophilia
atggacacctctgaacccgatatctccctgcaggacgagatcaaagccctgcgccagcaattggcggcccttcgtttcgacatccgtggaaaagactggctcaccgttgacgaggcagcccattactgcggcgtgtcgtcccgtcagtttcgaaggaacgcccctgatctcggccttgtgcccagaaacttcatgggcaagcaactctatgagaagaacgagctgtacaaagcaatcgagaactccggcaactggaaatcccgggggacaccgggcgcctctctgatcccgacctccccccagatggaggaagctcttgctcgactgagacgctacgaccagcgaaggggaaaggggtaa

SEQ ID NO: 536667 - DNA, 963 bp, Stenotrophomonas maltophilia
atgaacgcaaagcccgacttctaccgcgaccagcaagcctggaaggacctgcaagcgctgctgcccgaacacctgcgcctcgatgatgcgaacgcgccgcaggaagaattctggaattacctgggccaccaggtgcacttggatcgctacgtcaatccggacgcgccggcgaaggtgatcctgcaccacggcgtgggcaccaacggccgccagatgtcgatgatcctaggcgcgccgctggcgcgtcgcggcttcgagaccgtggcgctggacaatctcggctatgggctcaccaaggtcgcacccggcaccacgttctcctacgacgactgggtgaatctggtcgtggatttcatcgcgtatgagcaaacccgcgacgaccggccgatcgtgctgtacggcctgagcgccggcggcatgctgacctaccatgtcgccgccaaggcgccgaagggcgcgttgcgcgggatcgtcggcatgaccttcctcgaccagcgcgtgcagcaggtgcgcgacgaaaccgcgcacgacatcctgacttcgcggatcggcatcccgctgatggggacgctcgcgaagaccccggccgcgaagctgaagtacccgatgacgctggcgtcgaagatgagcgcgctggccaacaacgaagcggcgatgaagatgttcctgcgcgacaggacatcggccggcaattggatgtcggtgcgtttcctcgccagctacgggaactacgtgccggcgctcgagccggagcagttcgaccgctgcccggtgctgctgacccagccggccgaggatcgctggacgccgctgcacctgagcacgccgttgctgtcgcgcatctccaaggtcagcgtcgagacggtgatgctggagaacgccgggcactatccgatggaagagccggggctgcggcagatggatgaggcgatcgcggcgttcatgcagcgggtgtgtctctga

SEQ ID NO: 536668 - DNA, 1011 bp, Stenotrophomonas maltophilia
atggacccttggcactacccgcgcagccccgcctcgatcgaactcatgctgcgcttcgggcaagcccgcggcatcgcagccgaacgcctgctggccggcacccgcctcgccgctgccgacctcaaggaccccgaggcaaccctctccgcggcgcaggaactgcaggtcatccgcaacctgtacgcggcgctgccgcaggcggcagatgccggcctggacgtcggcctgacctaccggctctcgacctacggcctgctcggctacggcctgctcagcagcgcgaccggggaagcggcgctcgccctggcgcgacgcctgctgccgctgacctacaccttcgccgccatcgacatcggcaccgacggcgccagcctgcagatggcgttcgaacccgcccccaagttgaacggcgaaaccgcccgcttcgtggtggagcgcgcgatgggcgccacctcgcgcgtgctgcgcgacgtgatcggcgcggacttccgcctgcaggcgttcgaactcgcgtccccgggggcgcgtgcgccggcgacgaccacggtgttcggcgcgccggtacgccatgcccgcgcgcgcaacgcgatccgcttcccctacgccctgctgcaacgcccgctgccgcaggccaatccgatgaccgcggagatgtgcgaacgcatgtgccgcgaactgctgcgcaagcgcagcccacggatcgacaccgccgcgttcatccgcgaacacctggccggccatccgttcgcgcacccgccgctggtcggcgactgcgcgcgcatgctcaacaccagcgaacgcacgctcaagcgccggctgcaggacgaaggcacctcgttccgcgcgatctccaccatggcgcggctggaccgtgccaacgcgctgatccgcgaaggccgcatgtcgatggcgcagatcgccgccgacctgggattcagcgatccgacgacgtttacgcaggcgtacaagaagtggactgggattacgccgagcaaggccaggacggtgtga

SEQ ID NO: 536669 - DNA, 492 bp, Stenotrophomonas maltophilia
atgcttccctcgcacggctaccaaggcttccgcgccgccccgatctccaccggctgggtccagctgggcgacacctgggtgctgtggtggagtggtcgacagatcgccaacatcagacgcggcaaggatggcgctgtgcgcgtgcgtctggacgcccggaagatgtggcagatcaaggaagttccggccgccagcatcgcccagggcaagcgccacgccgagcgctggtgcgcggccaggctctacccagagttgcgcctgcgcgcggctgtggcccggctactggacaccacgccagccgaaccgctgcccggcctgcagccgactcgcgaacaacagcaggcccggcgcttggctgaagccggggccttagagatggcgcggatcaaggaagcgctcgatccgcgcagagttccagccgagatcaagcccagagtaaaaggcccgacaaaggcatggatgaaggcgaagagtgttcagagccgggactag

SEQ ID NO: 536670 - DNA, 435 bp, Stenotrophomonas maltophilia
atgctcaagtgttcagtcgtgttcgtaagctctgctgtagaagaagtggatgaaagtcggcttgcccaactaatgaccgctggggctaggttcaacgaggcgtgcgggtcgcgtgcggttgtgtgcttcgatggaagccgcttcttcacctacctcgagggggccgccagctcggtagctgcaactttggtctacgtcgagtcgctggccatccattcggaactggtgcaactcgctcgaggcaacgtccagcagcttcgctttccggaacagccattgctattcatgcgggtgaccacccctcagcttaagtccttggtccgtgccgactggaccaatttcgctcagcgcctcaaaggccggtttgatcccgttacgggtatggagctactcgccgacctggttgcgcaacgccgcgagccggcggcagcctga

SEQ ID NO: 536671 - DNA, 759 bp, Stenotrophomonas maltophilia
atgaacatgctcaactgccaggatctcatgcagacgttgggctggcgctgtcgataccttgagcagcatgctgctctgtatgtcagcactccgatcctattgccgggtggatcgcccttggatttttatctgactcagtccacggggatgactcatttcacggacgacggtttgacacttttccatctgcgcggactgggcttcaagctcgatgacaatcgatccatacgtggcatagctcagattgccaagggttatggtttcgacatcaacgattcagggtgcattgttgggtcggttcctagcagcgacggtcaggcgcttggccaagcgatcatccagcttttcacgaagattgttgcgtggcaggaggagcattttgatgctcgcgatgccgatcagactctggcagacgaagttgagcggctcatgagaggaaaggcgccaagtctaactatcgagcgataccccatcgtgcgtctatcgagcggggagagtgtcgacttcatgtttaagtgggggcgccatctggttgacgccattccggctgatgcacgagctacaagttctcgtatgagaaaggctatcttggtgcaacgggatgtcgaaacggcgctagacatcctgtacatcgtcgacgatcgacaacggccggtaaaggcggctaccgaagctgcattgcttgggcagatcgcaaaggcaatgaggcttacggactttcaggattactacatccctgatctttcttcttcgcattga

SEQ ID NO: 536672 - DNA, 495 bp, Stenotrophomonas maltophilia
atggattggatgcagaagtgccgcgaaatctgcaaacacgcgaagtatgtcggtgaagagattgtgtgggccgcgcgtgaagaccatgccggtgcgctcgccgctaggtctgccgtgctagacggcagtcgaatagtgatgcccggtttggagttcttgggcgaggtccaatatcgaacctacggtccatatcagaaatacagcctcatgcagttaagtggagggcggcggctgcgtgtcttcgtgttagaggtcatgcccagccacagacggtctcacgttgaaccaggcctagagctctatgggagccacatccaacttggcgacgaacgagagttcggggtttctcacctagcaaaaggcgtgaaatcaggcctggatgtaagctccgtcaagggatggatagagcgatttcagaggcatgcgcgggtgtacgatagcgacacgtacccattgacgccccctttcgtcgacgatctctttagcgatccatga

SEQ ID NO: 536673 - DNA, 318 bp, Stenotrophomonas maltophilia
gtgggtgactgctcggccggcgagcgcactggggcaaatgtcgcctacgtgtccgtcaaggatgatctgaacgcaccagccttggaggctggcgacgttctgttggtcgatctcggtgttacccgatggggatatgacggcgtctacgtcgtagatgtcaacggagagcctgttgttcgcttcgtacaggaccgaggcggtggaggactttacgtgtactgcctgtcgctcatcgatcaaggacaatcgctgccgcgcgagtcggtgcacattctggctgcggtaattgccgttacgaagaccaggaggatcgcgtga

SEQ ID NO: 536674 - DNA, 1080 bp, Stenotrophomonas maltophilia
atgacgtcaattcataaactcatctggtacggcctcgcactatcattgccactgattgcacagtcgacgcttgtcggcggcaaactagtacctgatgctgactctgcctactacctggccaccagcctacttcttaccgcagtccagattgggcaggcagccgcattccagacgtcactatcgacagtttcttcttatcaattttcccgcaagactcgcagcctaattgcgctcgcaggagcatctgcactcgcagtatccctagcattcccagatcaatcgctagcattgacctgcaccaccatagctcttggaattctagcaggcgcaacattctctatcagtaacgcatgccttcttaccacaggaactgaagttaaatacttcaggaggctcttctttcgaaatgccttggtactcacactatgcgttacttgtgccaatacactccccctcgacagcgcagccgcagtttgctgcgcagcactcattatcctattcatctcgatgtttgacccaacggccgcaacacccgaagaagcgacgcccgcttccacaccaagccgtcgatacctcatatcaatagcgactggcgttgctgcatcatcactctacagaaatgatcaaaatctcgttcgcgcagcatctgaaccttcagcaagcttcgcccagacacacaacactcttcttctcggcgcggcagttcaggcgggtgcaggagcattgctcacatcactggtaataccgcgagtaagagcgacgggcaacaccgagaggctcaggaggctactggatgcattaagcgctacgacattgatcgccgcggccatcatcggcttcatttccagcaatgaaactctaaccatcatcagtgcgtcgatgatcttggcatccaatcaatggggatcatacaagctccatcttcaaggaagatcactacaagtttatgcaattggcacgggtgcattcgccttgctggccacacttctcgctagcgggatagatcccggcttttcatatctcctcttcgctgtagccacacacgtcgcaatttccgccttcggtttcgccaaaagatga

SEQ ID NO: 536675 - DNA, 1311 bp, Stenotrophomonas maltophilia
atgatcacaaagcatgcctcgacctctgcgagcctagtatccatcgcactgataatagtcgccactgccgcagcactggttgaggccgggatcggtgtatccctaatgctctcggcaatcattctattcacttgcctctggatagcgtccagatcacggataccgcttagctggattggcgccgccctaatcttgaaggcgctctatgcgggcgacattcttttggctgtatttgacggacgacctctgcgatacgcaccagaggtcggcgcccaggctgccgagattcgcgcccaatgcttgctcatgctttgcatctgggcactatctttcctcacagcagcctcccatctcgcaagaagctattcagggttagccatcaacctgaaccagaagccatcaccaaaggcaattccggtccttctcattctgctttcccagattgcgttcgcagccattgtaaatcaggtcggcggcctcagcactatgcttgctaacatgagcagtcgctatgaaatctacttcggcatcggatttctaagagttatagtcggctttggtgctgtcggatgtgccatttactacctcagcggccgcaagcgcctggcttggataatctcagttctaatattcgccgagctcgccatgcttggcgggagaagctttgccttgttctccacaattgcaccaattgcgatgctgtggcttgcagagcgcaagagcatcccgattgcaagaacggcactgatggctgcacttggaatcacttttgttagcgctctagggacatacagatcttcccaactatcacagcagtaccataccgcaaccggcgttttttcaaaactggtattagacaccggagctgctgacaatttccccagcctcctgtcactccttagaagggacgcgacaccttatgcaggcgctgaaattgtggcgtcaagcctattctccgccattccccgagccgtttggaaagataagcccatgacggatgaggctgccgcggtaggcacggtgttagcaaatgcgggaaccgtaaactggggactcccaattggaccacatggtctggccttctataccggtggagctatcctagttccgctcttcggcctcatagccgggacattctttagtttcgtcctgagaatgtcgaagaggaatctcgcgtgggccagtatttctccattcttggcacttcttgctccagatgtcatctccccatccacctctgcccgagccttggtgctcgtggcagttgcaatcgctctgtcaatcgcgctccgtgtacggctgaaacgatga

SEQ ID NO: 536676 - DNA, 1203 bp, Stenotrophomonas maltophilia
atgaagatacttgtcgtcaataatttctacttccctcaccaagttggcggagcggaggagtcacttcaacttcagtgcgaagcgctcgtgggactgggacaggaggtgcatgtacttacaattgcgcacgatgagcagccgcgcattgcgaatgtcaatggcgtaactgtgcactatctcgccacagcgttctcccgcggctccccactacagaagaacagaaccctgctccgaagactgggctggcaatttggaacatctgctcagtttatcgcacaagccaggatatttagccttcttaaagacggaaagttcaacattctgtacgcgaacaacctaccaggaatcgggagagctgtcgtattgatggccagaatgctcggtattcctgtagttgcgggactaagagactacgcatggatttgtctacggcagtctcgctttgagggaggaaagaactgcgagtcgacgtgcatgaagtgccgcattggctgcataggaagaagggccctttcaaagaccgttcgtggcgttgccgcaaatagcaagatacttctcgaaccattcgaaagggactccgcctttacttccgcaaggaagaaagtcatatacgcaggtgccccaagcacaggcagaaccaagcccttatgcgacaggaaacataacgagctcacttcagtaagagtaggagtgatgggccaaatccagccatcaaagggcttcgacattttcctggatgaaacaaaagatatcgcactatcagggaagatcagcattgttgtttctggatccatatctagcgactacgctgcaaatcttcgcaatagacatgatcctgatcgagtgaatttcacaggccacatcaaccgctccgacttcttctctctagttgacatagtagttatcccctccatttggaatgagccactctctcgcgtcacgtatgaagctctttcacacggaaaggtggtagtcgcatccacccatggaggacagaaggaggtaattaaagatggatgtaatggatttatatacacacccggagacggatcgctgaaactcattctcatgaaattaattaacgaaccgcgcacgattgcggagatcgagtcaaacgcaatcaaatctgcccagcactacacgccgcagcgtgccgccgctgacttgcttgatttgtttgaaacagttgagaattcgaagtga

SEQ ID NO: 536677 - DNA, 1152 bp, Stenotrophomonas maltophilia
gtgaagatctgcctagttcacgactggttagtgacatacgccggctccgaaagggtactttccgaaatatccaaagcgttcccaagcgccgatattttttgcatagtagacttcctgtccgaagctgatcgagagagaattactcaagggcgatcaaccaagcagactttcatccaaaaactacccggcgcaaaaaagcattacagaaactaccttgctgtaatgccaattgcaatagagcagctagatctttccagctacgatgtgattatctcaagctcgcatgcggtcgccaaaggggtgctaaccggacccgatcagttgcacatcagctatgttcactctccgattagatatgcatgggatcttcagcatcagtatctgcaggagtccggcctcaccacggggccgaaatcatggctcgcgagagccatccttcactacgttcgactttgggattcgcgaacgtcaaacggagttgatcacttcatcgcgaactcaaaattcattgcacgaagaataaataaggtctacggaagagacgcggacgtgatataccctcccgtcgacgtggaatccttcaagttcagagaaggcaaggaacagttctatctttctgcatctcgactcgtgccatacaagagaatggatttgatagtcagagcattttcacgactacccgacaagcaactagttgttattggcgatggccctgacatggaaaaaatacgcaaccaagcaacgcccaacgtaaagatcctcggacatcaaccattcgaatcactaatgagccacatgcaacgtgcaaaagcttttgtttttgccgcggaagaagactttggaataacccccgtggaagcccaagcttgcggaactcctgttatagcgttcggtaagggcggctctcttgaaaccgtaaagcaaagcgcccacatggacgagtcgacaggaatctggttctccgagcagtcagaggattcaattattgatgcaatatatcgcttcgagaatctaaccagcccgattctagccgaaacgtgtcgaaagcacgcggagagattctcatccgaccgcttcaggtcttcgatcattgattatgtaaatagccactggaatagtttctctaaatgtcatcccaatcaaaccacctga

SEQ ID NO: 536678 - DNA, 375 bp, Stenotrophomonas maltophilia
gtggcattgggtctgagtcaggatgagataggcctcgacaatgccttagccagcagcgaaggtgcggtgtgggatttgggtggcgacactctgaagaacattgccatcgagatcacgaagaagctgcgcgacagcaccgcggtggattggcagttccgtgagagcgtccgcgctaagctgcggattccggtgcgacgcatcctgaagaagtggaagagcccgtcggtaggtgaggatgccgcgatcgaactggtcctgaagcaggcggaggcactgtcaaacgcgtgtcaaagtagacgcgcgattgaagaaggggggggcgccgataggcgcccgtgtgatctagcgaggggatatcggatcactccggcctaa

SEQ ID NO: 536679 - DNA, 150 bp, Stenotrophomonas maltophilia
atggctgaccagctgctcaccgctgcactgacctgggcgattgccggtggcctgttcgtcgccggcatcgccaccctgtgggcgatcagccgcgcatgccgcgcagcgcgccttgggctgcgctggtgctggcggagggctgtcgcatga

SEQ ID NO: 536680 - DNA, 336 bp, Stenotrophomonas maltophilia
atgagcgcccgtcgccagcacgccaacaacggcatggccgcaggtgggcggcccatccgcatcccccgctcggtcgacagcgtgcgcgcgcacctgaaacgacacctggtcgaagaaggcaagcgcatgcaggacctggccgacgcgtggggctgttcgaagcacaacgtctacgacctcttctaccgcgatcggcccatctccccgacccacatcgagctcgccgcgaagctgctccgtctggacgagttcgacaccaacgagctgcgcctgcgcggggcccgcgaggccggctggcagatcgaccccaccttccttctggagaagaaagcatga

SEQ ID NO: 536681 - DNA, 453 bp, Stenotrophomonas maltophilia
atgatccgccgccgccagctgttccgacatgagccgcacaacgagatctacggcgactgccatcgaaccgcgatcgcttgcctgctggatatggagccgtggcaggttccgcacttcacccagcttgcgcacacgactcccggatacgactgggaatctggtgtcgcggccttcttggctacgcacgggctttgttcggtcgacgtcgtattcggaccagagaacggcgtggaggggattttccgcttcatgcagaaccggaaccctcgcgcgttctacctgctgggcggcaccagcccaaggggcacgaaccacaccgttatctgctgtggcgacggcttctattgggatccgcacccggacagcgacttcctggacggtccactctcccacggcttctacgagctcaccttcctgatgccgctggcaatgcagatgcaggaggccgcatga

SEQ ID NO: 536682 - DNA, 222 bp, Stenotrophomonas maltophilia
atgaccagcatccacgtgaagcccgacttcagcggcgcgaccgaccgcgagaaggaacaggaacgccagcagctggccgccgacatggcacgtttccggaaggccggcggcaaggtccaggtactgggcaccaccggcatcgacaagcgcacgatcagccgccggcaggtggtcgagggtggccatgtccgtcgcgctgggaagaagggggtcaacgcatga

SEQ ID NO: 536683 - DNA, 363 bp, Stenotrophomonas maltophilia
atgagcgacgaatctatccagaagcgcgcgcggaagctgctcagtgacctgtgccttttgccgatccgccaggggcaggacgcagaaatcgccctgatcgccgccgcccttgcaccgcagtggctgccgattgattcggcgccgaaggatgggacggcgatcctgcttaccaacgggaaagatgtggctgaaggccactggttcttcgaggaaggcggaacaaccgagcatcgggatctggatggtcgctacatcggccagacggacagcgatggctacgacggctggatggattgggatggcggcatgcagcctgaccccacccactggatgccgctgcctgctccgccggaggtcgcatga

SEQ ID NO: 536684 - DNA, 306 bp, Stenotrophomonas maltophilia
atgaccatggaacgtttgacggccgcgatggccgagagcatcactcgctcgaaggatccgagcttcgctgtcgaaaccattttgcaaggcgtcagggccgctgccgaacacggaaagcgcgagtacatcacccgcgattacggcttcggcgatggttcctgctacacggccgaggaaaactacccggccctgtgcaaggcgatcctgaaagagctgcgcgacctagggttcaaagccgatatcggatccagctgcggccagttcgtcgacgtgtggctgtacgtgcgctggggtgaccaggcatga

SEQ ID NO: 536685 - DNA, 1740 bp, Stenotrophomonas maltophilia
atgcgcaccgtgaacctgatccagggcaccccggaatggcatgcccaccgcgccagccacttcaacgccagtgatgccccggcaatgatgggttgcagcccctacaagacccgcagccagctgctgcgcgagttcgccaccggcgccaccatcgagcacgacgcggccacgctgcagcgcttcgccgacgggcaccgcttcgaagacctggcccggccgctggccgagcggatcatcggcgaggagctgtatccctgcgtcggcgtggacggcaagtactcggccagcttcgacggcctgaccctgctggaggacaaggccttcgagcacaagtcgctaaacgacgacctgcgcctggccatgccgctggacggcaccgatgcctgcctgccgatgcactaccaggtgcagatggagcatcaggccatggtcagcggcgccgagcgcgtgctgttcatggcgtcgaagtggaacggcgacgagctggtcgaggagcgccactgctggtacacgccgaacccggaactgcgcgccaagatcgtggccggctgggtccagttcgatgccgacgtaatggcctatgacccggcgccggtagccgagcccgtggccgccggccgcgctccggaccagatgccggccctgcgcatcgaggtgaccggcatggtcaccgcgtcgaacctcgccgagtggaaggaacaggccatcgccgtgttccagggcatcagcaccgagctggtcagcgaccaggacttcgctgatgctgagaagaccgtgaagtggtgcggcgatatcgaggaccagttgaaggccgccaagcagcacgccctcagccagacccagagcatcgacctgctgttcaagaccatcgacgcgatcgccgaggaagcccgctccaagcgcctggcgctggagaagcgcgtcaagacccggaaggacgaacgccgcaccgagatcggcaacgccgctcgtcgcgcggtgcagcagcacgtgctggccatcaacgagacgctgggcgagcacgccatcccgatgccggccacgctgattgccgatatcggcgacgcgatgaagggcaagcgctcgttcgccagcatgcaggaagcggtggacaccgtggctgccaacgccaaggtcgacgccagccagtcggccgaacggatccgcgccaacatccgcgtcatggagatggaggtgggcacgcatgccgccctgttcccggaccgcgtgcagctgtgctccacaaagtcggcggaggatctgcgcaacttgatggcggcgcgcatctcccagcaccagcaggcggagcaggcgcgcctggacgccgagcgcgagaagatccgcagggaggaagaggcacgcgcgcagaaggcggcagccgatgcggcagctgcagctgagcagtccccgcagacggcagcggcccagcagcaggccgagccggtggcagccgcgctggcagcgactgcagcaccggtgcgtaccgccccgacggcagtggccagctccccggcaccaaacgcggcgccgcgcgaggtcgtcaagatcaagctgggcgacatcaacgcgcgcatcgccccgctgtcgatcagctccgatgggctggccctgctgggcttcaagccgatcaacgccaccggcgcggccaagctgtacgaccaggcgcagttcccggacatgtgccgggccatgatccacggcctgcaggatgcggccgaccagtacccgctggccgcgtga

SEQ ID NO: 536686 - DNA, 243 bp, Stenotrophomonas maltophilia
gtgagccgcgctcagcttgctgcagtgctggccgtgttcgccctgggtgtgctgctgggcgtttccatcgccgccattttcgtcttccgcgacgtgctcgccaccgtcttcgccgccggcgcgtttgccgcctgggtgatctgggtgatctgcggcgcgtggaagcacctgatcgaactgctgtccccttccaccagcagcgatagccccgccgtgaccgagccggcggaagacctgcagtaa

SEQ ID NO: 536687 - DNA, 156 bp, Stenotrophomonas maltophilia
atgagccaggacgcctcccagttcgaggagctgctgaaggcggagaccactcgcatgtcggtcgagttcatggcctacggcgcggtgatcggcctgatcgtcggcatcgctggcacgctgatcctgcaggacatgctccgggcggtgatctggtga

SEQ ID NO: 536688 - DNA, 210 bp, Stenotrophomonas maltophilia
atgaacaccaacgttcgccagatccgcgagttccaggccgtgcgcgatgcgatcgcctgcaccggcctgagcccggcgccgctgttccagcgcctcaatgctgagcagcgccggggctatcgcggcctctccgtagtcgacaacgctctgcgcctgcgccgccagttccgagacgagttcagcaaccagcccgatccggaggccgcatga

SEQ ID NO: 536689 - DNA, 228 bp, Stenotrophomonas maltophilia
atgagcgccattcggtccgatgtgaccgcaaagcttgacgagatggtccagggatacatggacgggatcgactggacctcgatgtctgagcccacctggctggcaagcaagccggtctcgtacatccatggtttcaagaacggcatggatgacagccagggcaaacctcgcgaaaaggccgaggttcttcgccgacgcgcagcaatgatcttgggcggtgctgcatga

SEQ ID NO: 536690 - DNA, 360 bp, Stenotrophomonas maltophilia
atggaccacaccgtccacaaatcagctgtccaggacctccatccagaggaagccgtccgccgccatcgccggaacatcccggtcctgatcggcaacctgaaggcctctggcctgaacatgcccggcgtcgataccgcgtaccgcgcggctctgttcgccggcgccaccgatgagctggcgtgggaagcgacccgtcgccatgagttggccatgatcgggttccccgatgagatctccgacgctggccttgacctgagcaaggccgaggcgatgcgtaagcgccgccaggcgctgatcgatacctgccgtgccctgcccaacccgttcgccctgggcgccgaagtgcaggtggcggcatga

SEQ ID NO: 536691 - DNA, 669 bp, Stenotrophomonas maltophilia
atgcgagtgctcgggttcatggcggtggctgtcgggctgatcatgctgctcttctcgtgcagcatggatacgagcgtgccgacggagtacggaggacgcgtcaacaacataggcttgatgcacacgcagacactgctcgtattcgtgagcctcggcgcgatcctcatcggcatggtgatgtggatcgcgggcaggaagaaaccggcatcctcaggctccaacgctgccgacgttcgtgtatacggcgctgaggagatcaaggacattgaggttctcctgtctggcaaggcccgaacaggaattgtgcttaggtcggatgacccgaagacagttgcctacgtggctcctaagtctccggctttcctggcaggagtagtagttggagatcgtttgatcgagatcgacggcctgttcccgactaccgatctccgcgagaactcggttttgctcgctggtgacgatggctctgaggttgcgatcaaactgcgtcgtgggagccaggccgtcgatctgttgatcaagcgcgctatcgcctttgacgaagtgcccgatctttcgacttcccagtcattgccggggagcacgaaatcgccggctggtggagtatggctttacatcgtgatcctggcggtagggcttgtggcgcttgcctaccggcttctgttctag

SEQ ID NO: 536692 - DNA, 240 bp, Stenotrophomonas maltophilia
atgaacattgtcgaatccgcgatctccaagctgactcctccctcccaggcagagctggcccgcgtttgcggccagaaaccacaggccgtaacgcgctggctcgccaaaggcattgtgccggcggtgcacgtcctcgccatcgaggcagcgacgggcgtatcccgccatctgctgcggccggacgtgttcggccccccggcggccaacgacgaccagcaggaggcgccccatgctgcctga

SEQ ID NO: 536693 - DNA, 480 bp, Stenotrophomonas maltophilia
atggacgaacggacgaagttgcagatggaaatccttggccgcctggaagatgccggccggaagctcttcaagcgggaactgcttaacttggccgatgaagagcgcctcacacgcgaggtcctctatctgaagggccatgggctggtcgaggcatcggtgatgcagctcgatggtgctcagagctttgccgcagtgacgatcacgtcgcgcggaagcgacgtggtcagaaaggagctgaatccgattggtgcagacctcagggtcatcacgatcaagattcatgaggacacgatccgtgcactgttgatagaccgtgtccgggagtcggatgccgatgacaccgtcaagggaaagttgattgaccaactcaagtcccttcccgcagaagctgcatcgaaacttgcagaacgggctctggatcaggctctccgatacatgccgaacgcaattcagtggcttcaaacagcgccatggagctga

SEQ ID NO: 536694 - DNA, 567 bp, Stenotrophomonas maltophilia
atgatgctaatcgaggagagctctcatcgtgagggtgcccgagcagagcttctggtatgcggtctccagccactgagcctgtcgatcatcaagctctttgatgtcctccccacgttgtgcgagagcaccgcgcctgagttggtacgactcggcgcgtttgatgagtccgaacgcggtttggatggggtctgctaccccgtccagcaggtgaagttcggccatgggaaccttgcaatcgcgcgcgccggtgagggcttctgcgatggcggaaagatcgacggcaccaaccatggagttgtttacctcggccgtcttctgaaggtagtcgcgcagaagttcaagatcgtggaagtactggagggcgaaactcttcgcgcgccgtatggcctcctgtcgcttcagtgcacgatcgcgagcggcgaagcgcgctgggacgtagatcgcaacgatgcccaccagcacggcggacgccagctggagccatgccaacgtatcgccggcagcggcggcggtctcaatgatgatcgtcctgtccatggttccccctttggttggaggaaagcatga

SEQ ID NO: 536695 - DNA, 600 bp, Stenotrophomonas maltophilia
atgcgcaacactgatccgctgaccgaagagctgcgccgctggggccatgcccaggtgaatcggttcgccctgagccgaggagaccgcagcattcatgtgctggacaaggtccgggacagcgcgccgatgaaaaaggacctggccgttcgcgaactggctccacgtgatggaaccgcgcggcgtcggatcatggcggcaggagctggtgtgaagggattgaacatcgttcccatgtgggcggccgatccgatccgtgcctccaatgacgccgaccacccgcatgacaatgccgagatcgcagtcgatatggggacccccgatgatctgcgctgggtcgacagggcgctggcagtgctggcgcggaactatctgctgcgatccatcgtgatcagggtggagttcacagcgccttcgaacgcggggcctgaggcccgggcaaggatggcttgcgagcggtttgaggtggagatggcgaggattcttggcgtcgatccgatgcccaaggaggagggtgagagctcggcgctgacggctcgccagtatcgctatgagctgtcaaaggcgctcgaccatctgaggggcatgcgactcgctgcttga

SEQ ID NO: 536696 - DNA, 483 bp, Stenotrophomonas maltophilia
atgagccagttcgaccagatcatcgaccgggtgctggcccatgagggcggctacgtgaacaacccgcgcgacccgggcggcgaaacccagtggggcatcagcaagcgctcctatccgcagctcaatatccaggcgctgacccgccaggacgcggtggagatctatcgccgcgacttttgggccagggtgaatggcgatcaactgcctaaggcctttgccttccaggctctggacgctgccgtgaaccacgggatcggcaatgcagtgcgctggctgcagcgcgccgccggcgtggctgacgacgggatcatcggcccccagacgatggccgcggtggcgcgggctgatccggccgacctggtgttgttgttcaacgctgagcgcctggagttctacgccaagctcggcacattcgatgccttcgggcggggctggacccggcgcgttgccggcaacctgcggtacgccgcccgggacaactga

SEQ ID NO: 536697 - DNA, 171 bp, Stenotrophomonas maltophilia
atgagccgattcgaatggattgcttggggcatcgcgttggtgctgatcatcttcggcctatggctggttgatcacagcttcgtcggtgcgctgctgagcatcgggatggccctgctggcaatgatttggtccatcgtgagcccgcatcccaaggtggacgcggggaactga

SEQ ID NO: 536698 - DNA, 153 bp, Stenotrophomonas maltophilia
atgccaacgacagagatccttgggggccgcgaccgtggcttcctgatggactgcgcccgctcgcaggtgcgtgccaagtaccccgggcttctggaaggctccagcggctggcatcgcgcagtgcgcaaccgctacagccgactgagggcctga

SEQ ID NO: 536699 - DNA, 477 bp, Stenotrophomonas maltophilia
atgtatgaactgacgaagaacccaggcgcggtgaaatgcctggacacgggtgcaacgattccggtggacgctgacacctggcaagccaggcagtacagggaatggctggacgcaggcaacgtcccggatcctgctccgctgccctacaagctctacagcccggaacattttgcagctatccgcgccagtgcttgggcgtggatgacgagctgggtagttgagcgccgctacgacagcattgaaacctgctgcagctacttcaatagcgggatcgcacggtatcgcgacgaggcacgcgcaatggtcgcctggcgcgattcggtgagccaagttttggagcaattggtgctggcgccgccgacagggattgagacctgggagcaggttcgggctttgctgccacagccggacgccttcaactggcccggcgaggtgtcgctgccgctgggcaccggtgaatcggcggtgctggaatga

SEQ ID NO: 536700 - DNA, 585 bp, Stenotrophomonas maltophilia
atggctgagcgcctgcgcaccatccgcctatacggcttgctgggtgctcgcttcggccgcaagttccgcctggccgtcagtaaccccgctgaggccgtgcgcgcgctgtgcgtgctgctgccgggcttccagcagtacctgatgggcgccaaggccaagggcatggagttcgccgtgttcgtcggacgggagaacctgtccaaggagcagctgcacgatccgcctggcgctgacgacattcgaatcgcgccggtgctggtggggtcgaagcgcggcggcatcctgcagacgattctcggcatcgtgctcatcgtggtcggcgtctggacccagaactaccagctcgtcttccagggcggcgtcatggtgctgggcggcgtttcccagatgctcgcaccacagccgaaagggcttggcgccaaagacagtgccgagaacaccccgagctacagcatgaacggcgcagtcaacacgcaggcgcagggcaaccctgtgtctgttgcctatggcggccacgacaccaagggaatgttcgtgggttcagcagtgatcagcggcggcatctacgcagaggatcagcagtga

SEQ ID NO: 536701 - DNA, 183 bp, Stenotrophomonas maltophilia
atggacgagaacactcgaaagctgatcgaggaaatggttcggcagcaggtgaaggaacagctggaacttgcgtgccgtccaggcgggatgctgttcccacccaaaggggcggcgattggcaggtccgaagttgaaggccagcactacgtgagcgctgtcatcaaggttgagcctagggaatag

SEQ ID NO: 536702 - DNA, 1278 bp, Stenotrophomonas maltophilia
atgttgaagattaaagtagagaatttctcctgcataaaaagcgcagagcttgaagtaaagcctcttacgataattatcgggccccaagcaagtggcaagagcgttcttaccaagctgctgtatttcttcttagagcaaattcagtatcagtacgagtctacgcgacatgagcactcgtttgatacctataaagaagcgtggaaggagaggtttgccgaatggtttcctgttggtgcttggggtggtgaaattttcagcatatccttcgaaatgggtgactataagattcgtgtcaagcgaacttcttatgctgaagctgcgaaagataacttgcgtctctggacatctgctgttgttaaggaaagctaccagcttgcattggatgggataaagaagatccgggctgcgggaaaagttggtgcggaagatagctttttgcatgagtatgatgcgatttttcggctaaaagagtccacgcaagagcgacttgcgaagaggcttcagggtgatttcattgcagatcagacgtttattcccgcgggacgatcattctttacgaatttagggcgtgctttcacggcctttgatcagagtaaaacgcttgaccctgcaacattaaaatttggtcgaatgttcgccacgattccggaacgtatgagtttcatggtgtcgcgtggaagaacgaacgccctggattccgagtttagagaaatgctcggtggaaagactatctgggagggtgagaggccaatttttgaggctatagatgggaggaaaatgcctttctccgcgctttcatccggtcagcaggaattattgccccttgcgaccctcttgagcgtcctgccttctggctcaaagcggccaaagagtcttgtagttatcgaagagcctgaagctcatctatttcccgagtcacagagtaagctaattcagctgttggctgcgaccgtaagtgcaaaggatagtcgaagggtactaattctgaccactcatagcccttatgttcttgcaaaggttaataatcttattaaggcggggcaggttgcggattcgatagggggcgagggttcggagctggttggcgcagttatacctgtatcggctcaaatgcgtcctgggagtgtggtggcgtatggtatgcgggatggcttgcttaatggactaatggatgaggatggtctggtggctgcggattatcttgattcaatatcctctgttatcggggatgagttcatgaggcttcttgagattgagtactctggtgctgagggctga

SEQ ID NO: 536703 - DNA, 711 bp, Stenotrophomonas maltophilia
atgaaacagacgcttatccgcttgggcaagctggacatttccgtcatcttcaaggcggtgaagaacgtccatctttccgtgcatccgccccaaggtcgggtgacgctcgtggcgccgactggcacacggctggaagtggcgcgtgcctatgccgtgtccaaattgcgctggattcgtcagcaacaggcgcagttgcaggcacaggcacgtgaaacaacccgccagtttgtcacgagggaaagtcattacatctgggggcgtcgctatctgctcacggtggtggagcatgacgccttacctgtggtgaagatggatcaccggcgcatcactctacaggttcgtcctggagccaacgcagccagacgcgaggccatttatcgacattggcagcgatccctattgcatgaagcgattccgcctttgatcgcacattgggaacaacgtatcggggtgaagttgaagggatatttcctacaacgcatgaagaccaaatggggcagctgtaaccacctgcacgctcatattcggctcaacacggaactggtaaagaagcctcgagacctgctcgaatacgtaatcgtgcatgagatgatccatctgatcgagcctacacacagcgaacacttcatcgccttactacagcagcactatcccgcctggcgggatgctcgtgcggaacttaacgcacttcctctggggcaggctgcctga

SEQ ID NO: 536704 - DNA, 3126 bp, Stenotrophomonas maltophilia
atgacccaactcatgccgcgttccgagcgcaacagccaagaccgcgtggcgcagctgtttgccactccactggccaatggaggcctgggctacgaacacctgggcaattggagcaagcgcgacaataaccgcgccgtcgaaaccgagttgctgcgcgccaacttggccgcccgcgggtactcccccgcacacattagcgccgccttgcagaagctggaagtcgcggtggatgttaccggcatcacgccctatcaggccaacctgcgtacctaccagttgttgcgctacggcgtgccggtgcagatctcggcgggccgatcgcatgagacagtacagttgatcgactggggagagcccgagcgcaatcacttcgcgttggctgaggaagtgacgctacgtggcgggagcacccgccggccggacatcattttgtacatcaatggcctggcggtggcggtgatcgagctcaaacgtagctcggttgatgtgggtgatggtattcgccagctgcgcagcaatcaggaggaaaccttcaatcagggcttcttcagcactgtgcagttgctgctggcaggcagtgatgcgcaaggcctgcgctatggcaccactggcactccggaacagtttttcgtgcagtggaaggatgagcaaccgtcaaccaaggtaacagctggcgcgttgctggatcgtccgttggctcagatgtgcgggaaggcgcggttgctggatttgatccacaacttcgtgatcttcgacgcgggcttcaagaaggtgcctcggcagcaccagtaccaaggcatcaaggctgcgcaggatcgtatcgtcaaacacgagggtggcgtgatttggcacactcagggcagcggcaagagcatcctgatggtgttgttggccaagtggttgctggagcgtgacccacaggcgcgggtgctggtagtgaccgaccgcgacgaactggacaagcagatcgaaggcgtgatgcgcaacgccggggtgatcggcgagggatctgcttcccctcgcatcacatcacgcgcagacttcgtgcaaaaactcggtgccaccctaccgcgcttgttgtgcgcgctgattcacaaattcgatgcggccgatctgaagggcgcaccaccgcctatccatggacgcttctacgtgttggtggacgaatgccaccgtacccagggcggcaacatgaacaagcagatgaagcgctggctggccgaagccatcttcatcggcttcaccggcacaccgttgttgcgcaaggaccggcagaccacacgtgaagtattcggcacgtatatccacacttataagttccacgaagccgtggccgacaaggtggttctggacctgaagtacgaggcgcgggatgtgccgcagcgactgacttcacgcacggccatcgatgcctggttcgagaagaaaacgcgcggactgaacaactttcagaaatcagtcctgcgcaggcgctgggccaccatggaagaactgatgagcgccaaggagcgcaaggatcgcatcgtcgccaacatcatcgaggatttcagcctcaagccccgtctggacaatgatcgtggcacggcgattctggtggcggcttcgatctacgatgcttgccattacttccggttgttccagaatacgcatttcggcccccatgtgggcatcatcacctcgtacgaacccaacccggttgccatctcgaaagaatcggccggcagcgacgaacgcttcaaatacgacacctacaagcagcatgtgctgcgtgccggccaagccaccaagcagtacgaagaagaaaccaagcgacgcttcatcgaagagcctgccagcatgaagctgctgattgtggtcagcaagctgctcaccggtttcgatgcacccagctgttcctacatctacctggacaacgaactgcacgaccataatctgttccaggccatctgccgtaccaaccggcttgacggtgacgacaaggactatggtcatatcgtcgattacaaggagcttttcggtgacgtgcagcaggccattgcggtgtacagctcccacgagttggacatcgatgcgggcaatggcggcgacaacaacgtccatctgaaaaattggctggacgaaggccgcaagcaactggacgaggcccgtgaagcgctgcattacctgtgcgagccggtgccgcagccgcgtgagctggagcagttcatccactatttctgcggccacgccggtgatccggaggcgctgctggaaagcgaggcgctgcgtattgccttctacaaggcggtggcgacctatctgcgtgccttcgcggacatcgccctgaacctgactgaggcgggttactcagaaagcaaagccaacaccctgcggcaggaaaccgagttctatgccgaggtgcgttcggccatcaagcattacagcggcgaggaactggacatcaagccctacgaggccgacatgcgccacctcatcaatacttacatccaggccgaaccggcgcaggcattgggggacttggccgaactgtcgctgaccgagttgatcatcgagaccggcatccacgatgcaatcgccaagaagctcaacgagaaggggaagctatcgaagaacgccattgcggaaaccatcatcaacaacgtccgcaagaccatcatccgcgaccgcctgaccgatccgcgcttctatgagcagatgtccaagttgctcgacgacctgatccagcaaagccgtgaaggcactgaagcttacgaagcattcctcagcaaggcagaagacattctgaagaggcatcgggcgaaacaacatgaccttgatgagcccgccatgttgcacggcaatgccggtgctttggtcatctatcgcaatctgcccggcatcatatcgggcgatgcactttcccatacggatgctgcagccaaagagctacagaccgattacggagacccgtgggccttcttggcactgagggttgaccgcctgatgcgggacgaagccccggcgggatggcggggggatgaagccaaggagcgcatcgtactgaacatcctgtatccgctgaccggccgcgaccgaaaggccacattcaagctattcgatctactgaaaactcagccgggttactga

SEQ ID NO: 536705 - DNA, 1056 bp, Stenotrophomonas maltophilia
atgaccgatgaactcagctctctgatccccgttccccagggctactccgactggctgtccgagctcaaggggcgcattcacaccgcgcagcagcgtgcagtgctggcggttaatcgggagttggtggagctgtactggcagattggccgcgacatcctggcgcggcaggccgagcagggctggggtgcgaaggtgatcgagcggttggcgcatgacctgcgtgctgccttcccggacatgaagggcttttcgcctcgtaacctcaagtacatgagggcgtttgccgaggcctggccggatgccgaaattgtgcaacaggctgctgcacaattgccgtggggccacaacctggtattgctggaccgcctgaaagcgccaatggagcgcctggcctatgcccatgcggccatcgaatatggctggtcgcgcaatatgttgaacatccatatcgaaacccgcctgctggagcgcacgggcaaggccattaccaacttcgatcagcgcctgcctgcaccgcagtccgatctagccatcgagtcgctgaaagatccgtaccgcttcgattttctcggcctgggcgaggaagcacaggaacgcgaaatcgagaaggcgctggtacaacacgtcaccgatttcttgctggaactgggcgcgggctttgccttcgtcgggcggcaagtgctgctggacgtgggtggcgaggagttcttcatcgacctattgttctaccacctcaagctgcgctgctacgtggtgatcgaattgaaggccggcaggttcaagcccgagcatttggggcaactgggcttttacctgacggcggtggatcggcaagtgaagcacgcgcaggacaatccgagcatcggactgctgctgtgcaagagcaagaacaaggtagtggccgagtacgctttgggagacaagtcgcagccaatgggcattgccgaatacaagctggtggaatccctgccgaaggagctacaaaccagcctgccgagcatcgaacagatcgagcgggaattggcgacccctccgaatggaagcacgaaggaatga

SEQ ID NO: 536706 - DNA, 1161 bp, Stenotrophomonas maltophilia
atggaaatgagaccggggtacaagcagacggaagtgggggtgattccggaggattgggaggtttccgtggttggtcatgaattcgacgtccaactcggaaagatgctggatgcagccaaaaacatgggtgaccctaaaccatatttgggaaatcgtaatgttcagtggggaaaaattgatgtaaccgacctatccacgatgcggatgacccgttccgacttggaacggttccggctgaaaagaggcgaccttctggtttgcgaaggaggtgacgttgggcgtgctgcaatttgggatgactctcttaaagagtgctattaccaaaaagcacttcatagactgcgcccattgcgcgaattcgatagcagactgatggttgagttgttacatcaatggagctgcagcggcatactcgccaattacgtcacgcaaactagtattgcccaccttccaagagagaaattcttagaggtaccactacctgttcctaagcccgaggaacaacgcgccattgccaccaccctcagcgacatggacgcgctgctggacggactggatcgcctgattgccaaaaagcgcgccatcaaacaggccaccatgcagcaactccttaccggtcaaatccggctgccggggttcaatggcgaatgggaggtaaagcgattgggtgatgtactcactatcaagcatggaaagagtcagaaatacgtagaagcaagtgacggctcatatccaatccttgcaacgggcggccaaataggcctcgcttctcagcctatctatgacaaatcctcagtgctgataggaagaaagggaacaatcaaccaaccgcaatatatggatcaaccgttttggtcagtcgatacactcttctactctgagatgaagaaaggcaacgtagccaagttcttttactacaggttctgtttgatcaactggatgcagtacaacgaggcatctggtgttccaagcctcaacgctagaacaatagaatctattgaactttcgcttccggatccagaagaacaaaccgccatcgccaccatcctcagcgatatggacaccgaaatcacctccctagaaacccgccacgccaagatccgcgccctcaagcaggccatgatgcaggaactgctgaccggcaggacgcggctggtctga

SEQ ID NO: 536707 - DNA, 2778 bp, Stenotrophomonas maltophilia
atggatattgaagtgacaagtaccgagaagaaggccaaccgattcatcagcacgcttgaagcaatgggggggtccgccgggaacctgcgccttcgagaggtactgggctggcaagaatcgacgtatgacagcgccaaacggcggctgatcgaggaggggcgaatcgtacccggtcgaggccgcggcggttcggtctccctcgtaaaagcggtccatgcggtcaacaatcaatcagtgagaattgcgaaagtgcgtgaagcgaaggtgccacagctgaaaaagcagtcgacgtcagttcgaccatctgggaagcagacagctgctacgtctgaacccaaggcacttcccgcacgtagcggggtcgtcaagaaatccgacctctacagctccatctgggcatcgtgcgacgaactacgcggcggcatggacgccagccagtacaaggactacgtgctgttcatgttgttcatcaagtacatcagcgacaagtacgctggcagcgacgacttcgccccagccgtgctcatcccccccggcgcgtcgttcaaggacatggtggcgctcaaaggtagggacgacattggtgacaagatcaacatccaggtcatccagaagctgatcgatcacaatgccaagttggcgcgcagtgacttccccgacttcaacgaccctaacaagctcggtgaaggcgcggccatggtcgagcggctgggcaacctgatcgcaatcttcgaaaagcccgagctgaacttcgccaacaaccgcgccgacaacgacgacctgctcggtgatgcctacgaatacctgatgcgccacttcgcccaggattccggcaagagcaaggggcagttctacacgccctccgaagtcagcagcgtcatcgcccaggtgatcggaatctcgcacgccaacgccagaggctctaccaccgcctatgacccgacctgtggttcgggttcgcttctgctgaaggtggcagccgaggccggtcgacacatcaccctggaagggcaggagaaggacgtgaccactgccggcctggcgcggatgaacatgatcctgcacgatttccccagtgccaccatcttcagtggtgacacgctggtgaaccccaagttcaaggacggcgaacaactgcgaacctacgactacgtggtggcgaatccgccgttctccgacaagaagtggtccaccggcctcaacccggccaacgacccgtaccaccgtttcgcttggggcgagccgcccgccaagcagggcgattacgcctatctgctgcacattgtccgcagcatgaaagccaccaccggcaagggcgccgtcatcctgccgcacggcgtgctgttccgtggcaatgtcgaagcccacatccgcaggcaactggtgcgctccggcatgctcaaaggcatcatcggcctgcccgccaacctgttctacggcacgggcatccccgcctgcatcctggtgctggacaaggaaaacgccagtgcccgtaagggcatcttcatgatcgacgccagcaaaggtttcatgaaggacggcgccaaaaaccgcttgcgtgagcaggacattcaccgcattgtcgacaccttccgccggggcgtggacgagccgcgctatgcgcgcatggtgccgctggatgaaatcgccagcgagcgcaacgattacaacctcaacctaccgcgctacatggacagcagcgagccggaagacctgcacgacattgatgcccacctcaacggtggcattccctcgcgcgacatcgatgccttcgccgccgactggcaggaaatgccatcccttcgtcaggcgctgttcgaggccgagcgtcccggctacgcgcggctgcgccagccaatggccgaagtgcgctccatcatcctcgcccacccccagttccagcaattccgcaacaaggtggaaaccctgtttggcaaatggcagcaggccgtcatgccgctgttcaccggcatccagcttggcgacaaacccaaggcgctgatcgtgcaggtctctgaaaccctgctcaccaccttccgcgctgcaccgctgcttgacccttacgacatttaccagcacctgatggactactgggccgaggccatgcaggacgacgcctacctgattgctgccgatggctgggtggcgttaccccggcgcatccttgagaccgacaagaagggcaaaaccagggacaagggctggacctgcgacctgctgcccaagccctacatcgtcgctcgctacttcgctgccgagcaagccgaactggaggcaaagcatgccgaactggaaggagttgccagccagattgccgaactggaggaagaacacggtggcgaagacggcgcgctctccggcttcgacaaggtcagcgccgcgcaggtcaaagaccgcctcgccgagattggcgatgatcccgacagcaccgacgaacgcgtcgtgctcaagcagtggcagcaactcagcgcccgcgaagccgcattgaaaagaaccgtcaaaacgctggaggcggaactcgaccggcaagcccatgaccattacttcaatctcagcgaaaccgaggtcaaagcgctggtggtgcaagacaaatggctggcttgcctgcaagccgacgtgcagcaagagctggatcgtatctcccagaccctcgcccagcgcatctgcgaactggctgaacgctacgaaacacctctgcccaagctggaagatgatgtggctgccctcagcaccaagatggaagagcacctcaaaaggatgggggcgacatggaaatga

SEQ ID NO: 536708 - DNA, 735 bp, Stenotrophomonas maltophilia
atgctcaccacctacgacatgtacaccgcagcagtcttcgaacaggccggaattccggttctactgataggagattcggccgccaacaacgtatttgggtacgagtcttcgctgcccgtaacggttgatgagcttttgcctctggtacgcgctgtttcccgtacagcaaagcggtccctggtgttggccgacctccctttcggctcgtaccaaggctctacagaacaatgcttccacaccgctgtgcgtttcatgaaagagggtggcgcacatgccgtcaaactggaaggtggcttggaaatggttccgcaggtgatgaagctcaccagcagcggcatcccggtcatggcgcatatcggattcaccccccaagccgaacaccagctcggtggatatcgcgtacaaggcaggggtgaatcggcagatgcactggttgaacttgcccaggaaatggagcaagcgggagcgttcgcattgctgctggagatgattccaggagaagtggctcaacgcatcacgtcatcggtaaaaatcccgactgtcggtatcggcgccggaagtgagtgcgacgcgcaggtacttgtatggcaggacatggttggactgcgcactggaaagctaccccgctttgtgaagcagtacgctgacatgcgtacggtgctgcttgaagcggccagtgcatacatagacgatgtccgcagtggtcaattcccaggtccagagcacacgttctag

SEQ ID NO: 536709 - DNA, 465 bp, Stenotrophomonas maltophilia
atggacgcatatgaccgaaagattcttgccgagctgcagcgagacggccgaatttcagttaccgatctggccgcgagggttggcctcagtctttccccttgccaccgtcgtcttcggacgttggagcagagcggggtcatccgaggctatcgagccgagctggatcctgcggcactcggactcggattctcaaccatcgtcttcgtcactctcaaggagggcgacaagcgagcggtggaggcattcgaaaaagctgttgtcgcgttgcatcaagtcgtccaggctcagcgactcttcggcgatcccgattatctgctgcaggtactggtcaaagacctatcagcgtttcagcgtctttacgatgccgagctgtcgtcgctgcccggtgtgcagagactcacctccaccctggtgatgaagcaggtggttgccgagcgcccgctctttcctggtggcacgcaataa

SEQ ID NO: 536710 - DNA, 636 bp, Stenotrophomonas maltophilia
atgccacctgcgccgatcgctgaaacggatgggcagccgggccgtcgatggcaggaaattgtgcttcagccggcttaccttgtggcgctgtttggtgccgctaccggctacggaatcatgatcctcgccatgaccgcgacccccatcgcgatggttacgcaccatcacgaactcgccagcgccgcgaccgtgatccagctgcacgtcctgggcatgtttcttccatccttcttcaccggttccctgatcgctcgatttggggcgatccgcatcatgctggctggtgccatgatcttcattggtcacgtactaatgacgaccacggggaccgggtttggttcgtttgctgcagcgctggtcatgctcggggtgggctggaatttcatgtatgtgggtggcacggcgctgctcaccaccacttacaccccggtggagcgcgcgcgtgcgcaggccatcaatgacatgacgatctttgcggtgggcctgacctgctcgttcagtgctggaggcctgctcgatgtactgggctggcagcagatgaatctagttctgatcccctggctgctggcggcggcacttgcactgtcatggctcggctggaaaaggtgccgtccggcaccggcctccaactcatag

SEQ ID NO: 536711 - DNA, 1047 bp, Stenotrophomonas maltophilia
atggcacgcggcggcttgtacaagagcgacatccagaaggcccgcgatacgctgcgggcgcagggcaagcacccgtcagtggacgcggtgcgggtggcgctgggcaacaccggctccaagaccaccattcaccgctacctgaaggaactggaagaagaggaagggcaaggcctgggcgccaaggttgcggtcagcgaagccctgcaggatctagtaggccggctcgccgggcgcctgcacgaggaggctgagatcgtcgtcaccgaagcacagcagcgcttcgcggcccagctacaggagcgtacgggcgcattggagcaggctcagcagaaaacagccgcactcggcgatcagttgcagcggaccgagacgatcctgcaggaagagcgcgccgcccatgcgtcgacccagcagaccttggccgatcgggtgaccgaggtggcccgactcaatgagcgcatcgccggcctgaccgcccgcctgggcgagcacgaggcccatgcgaagtcgctggaagaaaagcatgcccacgcccgcgacgcactggagcactaccgaacctcggtgaaggagcagcgcgaacaggaacagcggcgccacgagcaccaggtgcaagaactgcaggtcgcgctgcgccaggctaacgaggccctgacggccaagaaccacgaattgctccagctcaaccgcgacaacagccaatggctggagcgccacgggcgcctggagcgggagctgaccgaagtccgccgcggcatcgaggtccagcaaaaggaactggacgccttgcggctgatggccgcagagcatcaggcattgcaggggcggtgggccgaagacgcacaggctctggagagggcgcgggccgagttggccagtgttcgtgccgaagcggccaaggagcgggaacgccgcgagcaggccgagatcgaggccttgcgtgccggcgtacgactggaaacactggaacaactactggtgcagctgaaacccgatcaggccgctgccgacaccgcgtcaggcgaaaaggggcggggtcgtggatag

SEQ ID NO: 536712 - DNA, 168 bp, Stenotrophomonas maltophilia
atggtcgggattcgcgcgaaacgggccaaggacgaggacatcgctaagaagtgtactgcggacgagtccatttggaagcgcgacgaattcagaaagttcccgagatccagcggtttcgtactggtcaagggctggcagaaggcgcctgcgggctatcaggcgggataa

SEQ ID NO: 536713 - DNA, 393 bp, Stenotrophomonas maltophilia
atgaaattacgccagttccggactcggtcactgcggctgcgcttcgcttggctggcattattggcattgttgttccaacaggtcgcgctagcagcgtatgcgtgcccgatcaacgaggcgccgccggaaccccggacgatcatggcgggctgcgaaggaatggagatgcccgatccgcaggcgccggcgctatgcgaccagcattgtctgcgtgaccacgtcactagccaagacatcaaggccctacaggtaccttcactggccttgccgccgctgaacttcgctttgagcgcggccttgttgccgcccgccgaagcccagtactacaaagacgttcctacctgccggtccgatccaccgccgtcgcagcgcttctgtagcctgcagatctaa

SEQ ID NO: 536714 - DNA, 1308 bp, Stenotrophomonas maltophilia
atgttcgccctttatcccctgtaccgttggtgcaggcaacgccgttgggccgccttggtgctggtcctcggtctgattgccacccctgcttggtccgctccccccggactgtcccttgacgatgctgtgcgactggccacagagcgagcgccgatactcgctgcgcgtcgatcgcaaaccctcgccgcccgcgaagaagcggtgcgcgcggccgccttgcccgatccgaagctgaccctcggccttgccaactggcccgtcacgggcgccgacgcgttcgactttcgcgccgatgacatgaccatgaagcagatcggtgtgatgcaggaattccccgcccgtgccaagcgtcaagcgcgccaggccgtggctgatcgcggcatcgaacaggcccaagcactatcaacggccgaggcatcggtcgtacagcgagaggccgccacggcctggatcgccctgtgggcggcgcaacgcgaagtcgccgcgctgcagactctgcgagagccggccactgtcgccgtccgcactgccaaggcacggttagcgagcggcaccacaactgtgaccgatacgttggctacgcaagcggcggcgctcgaactggagaaccgaatcgatgccgccgaggcagcgcaagaagcggctcgcgccagtctggcgcgctggctgggcatggacccggcggatatccaaaccgagggcgtaccgccagagctagcgactctgcctgtcgccccggccgcgctactgacctcgatcgaccgtcaaggaccgttgctgccgtggcgctcacgcgaagccctggccgaatcggaagtcgacgcggcgattgctgaaaaacgcccggactggagcctcggcgtgagctacggtcagcgcgatcgcacgccagaaggtatgtcccgcagcgacatgctaatggtcgaggtcgccgtcgacctgccgctgtttgcacgcaaccgacaagatcgcggcgtcgccgcccgtcgcgccgagttggacgcggtagcggccgaacgcgaagacgcccgtcgtgcccagaccgaaaccgtgcggcggaccttggccgaatggcagggtctgcagagccaagtgatgcgcaaggaaaccgaaacccttccgctggcccgtgacagggcgaagacggcgctggccctctacgccggcggcggcgacttgcagccttggctggaggcacgccgcgatgagatcgaactgcacatcgaacatgcccgtcacctgggcgaactcggtcgcgcctgggcagccttggcctacctgctgcccgaaaaggagaccgcaccatga

SEQ ID NO: 536715 - DNA, 1449 bp, Stenotrophomonas maltophilia
atgacgcgcacgatgactcgtatatcgatggcgattaccgccctcgcactgctggccgtgggcctgggtggtggttactggtgggcgcagcgcagcgctgatcacgagatggcaaaggctactgcaccaaccacgaccgccgagcggcaggcactgtactggtatgacccgatggtgccggatcagcacttcgacaaacccggcaagtcacctttcatggacatgcaactggtgccgaagtacgccgatgaaatcggcgtcggcggcggtggcgtacgcatcgatgcggggttgcaacagaatgtgggcatccgcacagtggtagtcgagatgggtcggctggcccagagcatacgtgtccccggcacattggcctgggatctgcgccaggagtcggtggtcagcgcccgtgtcgagggcctcatcgcccggatgcaggtcaaggccccgtacacgcaagtgcgccgcggccagccgctcgccacgctgctggcgccgagctggagcagcgcgctggcagaagcacaggccttgcggcaggcgcaatcatcctcggcgcgggagttgcaatgggccgcgcaacaacgcctgcgcgtgctcggcgtgcccggtggcatgggccgcgacggtagcgtggcgttaagtgcgcccagcgatggcatcgtcaccgaagtgttggcgcgcgaaggccagacggtcatgcccggcacgccactgttccgcctcaacggcaccaccacgctatggctggaagcggcgattccgcaggcaagcacggcacaattgcgtcccggcacgccggtcgaagcgctggttggcgctgtgccgggtcagaccttcgtcggcgaagtcgaagcgctgttaccacaggtcgatgtcgccagccgcacacagcaggcacgcatcgtgttgcgcaatccagacggcgtgctcgcccccggcatgttcgccgaggtcacgctgcaaccgcaggccggcgcggcgatgccgctggtaccgaccgaagcactgatcgccaccggcgccgacagccggatgatcgtacaggatgccgacggcagcttccgccccgtgcgcgtgcgcaccggacgcagcggtgagggccgcaccgagatcctcgcgggactctcgggtggcgaacgtgtcgtcgtgtccggccagttcctgatcgattcggaagccagcctatcgggcgcgctggagcgcttgggcgacgtgcccgcggtaatgccagccccccaccggattgatcaggcctcggcggcacccaagtcacgatcgtgctcggtgcagtactggtacgacccgatggtcccggataagcacctcgaccagcccggcaagtcgcctttcatggacatgcagttggtgccgaagttcgtgccgggcgcggatcccgattgcaccgtccacgacgtgaagccggtcgattcggaggtgcaaccgtga

SEQ ID NO: 536716 - DNA, 411 bp, Stenotrophomonas maltophilia
atgaaactgacacttatcgttcccaccctgaccgcgctgctgctggcggcctgctcgcaagcgcccagtagcgacacggctaccgccaaggacgcggccgccgccgatatggcgatgcccgctagtgaacacgcgcagatggccgatgcggtgaaatctacatcgggcgatatggcgcagccggccaagatcgcttccgcgacggggacggttgaatccattgccgctgacacaggcaagatcaccatcgcccatggccccgtagaagcactagcttggccggctatgacgatgggatttaaagcaacgccagaacagatcgcctcggtgcaggtgggacaaaaggtccaattcgaatttcaagccaaggccatggacgcgaccattaccaagatcgtgcagcagcagtga

SEQ ID NO: 536717 - DNA, 357 bp, Stenotrophomonas maltophilia
atgaccaggcttggctggctgggttctggcctgcgctggctcctgctggcgcacttggccgtgggtctggtggcgcagccggtgctggcaatggtcggcgagctacatgttcaaacccatctggccactgccgaccgcggcccggcagtgtcgccgccagctgccgagcgtggcatagacgttgccctgcaccggcttcagcagctggtgctgtgttgcggccaagccgtgccggcccctgagatcctgctggccgtggcggacatcggccggtatttgcccgtactgaacgccgatacgccgacgtatccgcacgcacacccgattgcgccattccgaccgccgatcgcagggtga

SEQ ID NO: 536718 - DNA, 474 bp, Stenotrophomonas maltophilia
atgtcgaatcaccctccttccatgaaccatcgaagccactacgcccgcctgatcgtcatgatggtgctttcgttcttggtgatgtacgcattcatgtacgcaatggtggatcgttgggagaatgtctacggaaacgtcaaccagttctacatggcaggattgatggcttctccgatgttgctcatcgaaattgtgctgatgtccaccatgtatccgaatcgtaggtggaacgtcctgctttgcctcggcgcattgttcttcatggccgcatgttggattggcatccgcgagcaggcagccgtcagcgaccgtcaattcatacggtcaatgatcccccatcatgccggcgcaatcttgatgtgcgagcaaacaaacctaagtgatcctgaactccaggcgctatgcaacgaaatcgtcgactctcaacgtgctgaaatcgcgcagatgaaggcgctacttggggaagagatctag

SEQ ID NO: 536719 - DNA, 360 bp, Stenotrophomonas maltophilia
atgaaacgcgttgccccactttccctgctgacactctccttgattgccggtcccaccatggccgcggatcaatccactcctcccccaacgacccaacccaaaaccgaacacagccagatgcagcacgaccagatggaccacagcaagatgatggaccacaacgataaagaacaacatagcggtcatggccaacaggatgcggcacccggcgaattcactgcgctggacgcgaacagggatggcaaactctcgaaggcggagatggccaagcacaaactcgcgccgcatttcggcatgcttgacctcgacaagaacggctccttgagttcggcagaatttgcagctggcaagaccatgtag

SEQ ID NO: 536720 - DNA, 2448 bp, Stenotrophomonas maltophilia
atgaatccgcacgaccctcatcaccaccatacgggtgtggcatcgcggggcgacacccaatccaagtctgcaaccggccgcgcgcccggcgctccggcaatggttgttgacccggtctgcgagatgcagatcgatccgcagaccgcggtacatcatgccacccacaacggcatggactatcacttctgttcggcccgctgccgacagcgcttcacggccgatccaggcacatacttgtcacccgaagtttccaaggccagcatcgatgaggagctcgtgccggcgggcgcgatctacacctgccccatgcacccgcagattcgccaggaccacccggggacgtgcccgatctgcggcatggcattggaaccggagatgccgggcctggacgacgaagagaatcctgagctgcgtaatttctcccgacgtttctggtggacattgccactgacgctggtggtacttgtcttggccatgttcgggccaggtctgggcatcctcactgtcagatcacggacctggctggaatttgctctgagtaccccggtagtcctgtgggcagcgtggcccttcttcgaacgatgcgtgcagtcgatccgcaaccgcagcccgaatatgtggaccctgatcggcattggcgtcggggcctccttcctctatagcgtggtagcgaccatagctccaggcctgttcccggtgtcgttccgcgagcacggtcgagtgggggtctattttgaggcggctgcggtcatcgtatccctgactctggtcggccaaatcctcgaactgcgagcacgctccaagacgtcggcggcgatcaaagcgctgttggggttggcccccaagaccgctcggcgggtgaaggcggacggcagcgaagaagacattccgctcgaacacgtccacgtgggcgaccgcttgcgcgttcgccccggagagaaggtgccggtggacggcactgtggatgaaggtcgctcaagcatcgacgagtcaatgctgactggtgagcctattccggttgagaagatgccgggggagcgtgtcattggcgccactctcaatggcaccggcagcctgatcgtccgtgccgaccaagtaggctccagcaccgtgctggcgcagatcgtgcaactcgttgcccaggcgcagcgctcgcgtgcgcccatgcagcgcatggcggacaaagttgcgtactggttcgtattggccgtgctgggtgcagccgtgctgactttgcttgtctggggcctgttcggaccggagccatcatggacctatgcggtgctcaatgccgtgtcggtactgatcattgcctgtccctgtgcactgggcctggccacgcccatgtcgatcatggttgccacggggcgtgcggcccaggcaggtgtgctgttccgcgacgcacaggccatagaacaactgcgcactatcgacaccctgatcgttgacaaaacaggcaccctgaccgaagggcgccccgcattcagggattctatttctgccgccggatacgatggcgacacgctgctgcgctttgctggcagccttgagcagggcagcgagcacccgttggccgaggcgattttgaccgaagcccggcggcgcggtctggccttgtccgcaacggacgatttcgcatccatcaccggtcaaggtgtgcgtggccgtgttgatggccacatgattgcactgggcaatcaggcgctgatggaagcgactggtgcagacattgcgcccgtgcttgaacccgccgagaacctgcgcaaggagggggcaagcgtgatgtacctcgctgttgacgggcgactggctggcgcgatcgctgtcgcagatccaatcaagcccaccacatcggcggcgctggacgcgctgcgtgccgagggcctgatgttggtcatggcctcgggtgatgcactggcaacagccgcagcggtggggcgcacgctcggcatcgaggatgtgcgaggcggagtgcgtccgcaggacaaggtcgcgctggtgaagcaaatgcgggcgcaaggccgccgcgtagcaatggccggcgacggaataaacgatgcgcccgcgctggctgcagccgatgtcggtattgcgatgggcactgggactgacgtggcaatgtccagtgcacaggtaacgttggtcaagggagacctgcgcaggatcgtgcaggcgcgagccatctccactgcagctgtcgccaacatgaagcagaacctgggtttcgccttcatctacaacgctatcggggtgccaatcgcagccggagcgctgtacccgacttttgggctactgctcagcccaatgatcgccgccctggcgatgagcctcagctcggtttcagtggtgaccaacgcgttgcggttggcgagaaccagcacccctgagctcccttcacccgatgaccgccacgctgagccggtgcgcggtacatcctctcatcactga

SEQ ID NO: 536721 - DNA, 492 bp, Stenotrophomonas maltophilia
atgactatgcgattgatgaggagcttgagcctgcttctgctagtggcgatcccaggccttttgcatgcgcatgaggggaagaattcgacaacagcgaccactgccattgcgcccgaagcacagccagcagtagctatcgtcgagcaattctctacagccctgcagaccggtgaccttgaccgggccggggccttcctggtcgatgatgttttgatcctcgagaacggtggcgccgagcgctctcgcaaggaatacctggatggtcacgctacacacgatgcagcgtttctgaagaccgcccatgtggaagttctccggcgcaccgcccacgcgcgaggcgatctagcctgggtcggtagcgaaagtgaactgcacgcgacgaaagatgggaagccgatggcgttgctgagcaccgaaaccatggtgcttgagcgtacttcgcagggctggcgaatcgcccatatccactggtcctccaggcccaagcgctaa

SEQ ID NO: 536722 - DNA, 864 bp, Stenotrophomonas maltophilia
atgacaaccaccgctaacaaaaagactctgcttattaccggtatcgcgctcgccgttctggctctcggcgccgccggtgttgtgtactccggaatctataatgtggctgccgacgatccacacacgcgccccgtctatgccctgctggaggcggcgcggaagcagtcgatttcagcacgggccaccaagctggaggtgcctgcagatctgaatgatccagagcgaatccggcagggcgcgggaaactacaacgcgatgtgtaccggctgtcatttgtcacctggcgccgcagagaccgagctgagcaaaggcctgtacccgtccccgccgaacctgaccaaggagaccattgatgcagccgaggcgttctgggtcatcaagcatggtgtcaaggccagtggcatgcctgcttggggcaaaagcatgggcgatgactacatctggaacatggccgcattcctgcaggaactgccgaagctcgacaagacgcagtacgacgcgcttgtaggtagtagcggaggtcattctcacgggggcggtgaaaccggcgggcacgcccatgcggacggaggcaaggaccaccacgatgaagccgaggccgatcaccatggtgaaggtgaagcacatccggaaggggcgcacgcggaaggccacggcatgaccgcccaggaaagtgcaggcaaggctgacgctcctgcagcaccaacccacgtccatgccgatggcaagtcccacacccattctccgcaggcaccgacaacgccgacagcatctgacccctctaagaatccgcacgatggcatgtccatgcagggtacggaatcgtcccaatcggctgatgacggccataaccataaacattga

SEQ ID NO: 536723 - DNA, 1038 bp, Stenotrophomonas maltophilia
atgaaaaaccagatgaagccgacgaggtcggcattcaccctgctcatcgcggttgcattggcatcacccgcgttcggacagaccatggatcactcgaaaatttccatgacaatgcccgaggcgcctaaacccgagccccaagctgacgcgtccaagacgtctggcccaaatgcatccaagcgcggcactgatcactcgggcatgcagcacgagacgcctgagccaaaaggcatggatcatgatatgtcgtccatgcaagaaggcgacatggccactgacgccatggaccattcaaagatggtccacgatgctccgtcctcgaccatgccacgcacaccaatccctgttgtcaccgacgtcgatcgtgctgcagcggtggcgccttcggaggggcacgccacgggtgacaacgcgatccacagctatatgttgctggaccgcttggaggcctgggatgcagatccagggaccggacttgcgtgggaaggtcagggctggatcggtaccgacctcaaccgtctctggttgcgcagcgagggtgaacgcagcgatgggcgcactgaggcagcagaccttgagctgctctacgggcgaagcatagccacctggtgggacttggtggctggtgtgcgccaggacttcaagccaggacgggcacaaacattcgcagccataggcgtgcagggtcttgctccgcagaagttcgaggtcgaggcaacagcctattttggggagcgcggccagtttggggcacgcttcgaggccgagtacgaactacttctcaccaatcgcctgattcttcaacccatggtcggaatcgaggcgtacgggaagaacgacccggcgcgcggcatcggcgcaggactcagtaccgccgagtttggattgcgtcttcggtacgagttcacccgcaaatttgcgccgtacattggcctggttcacgagcgcgccttgggcaacacagccgacttgcgtcgtaacgaattggaaagcgctgacgatactcgcattgtcgtcggtctacgcacttggttctga

SEQ ID NO: 536724 - DNA, 1839 bp, Stenotrophomonas maltophilia
atgtctttcgatcccgtcgatgaccggcgaagcgtatcgcgtcgccgttttgttcagggtcttgctgccggtggcgcatttgctgggctcggcctctggccaaaatcaagctgggccctgaagggggccggccagctcaatgtccttagtgggaccgagtttgacctgacgatcggcgaaactccggtgaacttcaccggacgcgcccgttcggcaatcacggtgaacgggtcgctgcctgcaccgcttctgcgctggcgtgaaggtactacggtcaatctgcgggtggccaacgcattgcctgtcgggtccattcacggtagtgagacctctatccactggcatgggattttgttgccagccaacatggacggcgtcccaggcctgagcttccacggcatcaaccgtggtgatgcctatcactaccgctttacggttcagcaaggcggaacttattggtaccacagtcattcaggcactcaggaacaggcaggtctatacggcccgctggtgatagatccgatcgaaccggaaccctttgccttcgaccgcgactacgtggtgatgctcagtgattggaccgacctgagcggcgacgcgctgtttgcgcgattgaaaaaaatggccgaccacgacaattactacaagcgcaccgtaggcgacttcctccgcgatgcccaacaagacggtcttaaggcaacgttggccgaccgtcgcatgtggggctcgatgaggatgacgcccactgatctttcagatgtgaatgccaacacctacacgtacttgatgaacggcacaaccgcgctgggcaattggaccggcctgttccgttccggcgagaaggtacggttgcgcttcatcaatggctctgcaatgacgtatttcgacgtccgcattcctggcctgaagatgacggtggtcgccgctgacggccagtatgtgcacccggtgacggtcgacgagttccgcatcgcggtagccgaaaccttcgatgtgatcgtagagcctagcggccaggatgccttcaccatattcgctcaggactcagggcgaaccggtcatgtcagcggcacccttgccgtccgcgaaggcctgcgagcaccggtgccagagctcgatccgcgcccgatcctgaccatggcggacatgggcatggcgcacggagccatggccgaaatgaacagcggtagcggcgacaagaagatgtctgacactacggacgatccccatgccgggcacgacatgggggggatgcagagccatgcaatggccggcatggacatgtccacgggaagcatggatatgggcggcgatatgcagtcgcaccccgttggagaggccggcaacccattggttgataaccaggcaatgaagccgacctctcgcttagacgatccaggcaacggcctgcgtggaaatggtcgcaaggtgctgtcttattcgatgctccgaagtgcttttgaggatcctgacggccgagatccgggccgcgacatcgagctgcacctcaccgggcatatggagaaattcgcctggtcgttcaatggggtcaaattctcggccgccgaaccactgcgattgaactacggtgaacgcctgcgcatcgtgttggtcaatgacacgatgatggcccatccaatccacttgcacggcatgtggagcgacgtggaggacgatcagggcaacttcatggttcgcaagcacaccgtagatatgccccccggtagcagacgcagttatcgagtgcgagctgatgcgctgggcagttgggcctaccactgccatctgctgtttcacatggaagccggcatgatgcgcgccgtgcgggtggaggaataa

SEQ ID NO: 536725 - DNA, 435 bp, Stenotrophomonas maltophilia
atgcgcgccacccgtcccggttccgtcactcgtgcggccgacaaggcaggcgtcgttggttccatcgtgacggcgattggctgcgcaggatgctttcccgccctcggcagcttgggcgccgctatcggcttgggcttcctgagccaatacgaagggctgttcatccgctacctgctgccactatttgccggcattgcgctcctggccaacgtgatcagttggcgtcgtcacgggcaatggttccggggcgcgctgagcgtgacaggcccactcctcgtgttggccgcggtgttcgtgatgcggatattggatcagcgcagcggctatctgctgtatcccggcttggtgctgatggttgcggttgcgatctgggatctgatttcccggccacgcaaggccggcgccacgaccgatgacaagacagagtgctgttaa

SEQ ID NO: 536726 - DNA, 288 bp, Stenotrophomonas maltophilia
atgaagaaactcgccgccgttctcgtcctgggcctcgcgttcaccgcaccagcctgggccgccctcaagaccgtgacgcttgccgtgccgggcatgacctgcgcgacctgcccgatcaccgtcaagcggggactgagcaaagtcgaaggcgtgaccaagatcgaggtcagctacgaatcgaaggaagccgttgtgaccttcgatgacgccaagacctccctcaaggcgctcaccgacgcgacgaccaacgtgggctatccgtccaccgtcaagcggaagtcgccctga

SEQ ID NO: 536727 - DNA, 351 bp, Stenotrophomonas maltophilia
atgaaaaacactaaaacgggtgccgcggccctgctcgccggtggcgtcaccgcgattctggcctcggcgtgctgcctcggcccattggtactggtgaccttgggatttagcggggcgtggctgggcagcctcgcggcgctcgaaccctaccgtccgctcttcatcggtgcggccctggtcgcaatggtctttgcctggcgccgtatctaccggccggccgggacctgcgcgccgggcgaagtctgcgcggtgccccgggtcaggacggcctacaaagtgttgttctggatcgtcgcggccttgattctgctggcactgacgttcccctacctcgcaccgttgttctactga

SEQ ID NO: 536728 - DNA, 402 bp, Stenotrophomonas maltophilia
atggacaacaacccggaaaacctgaccatcggcgccttcgccaaggcagccggcgtcaatgtcgagacgatccggttctatcagcgcaaagggttgctgctcgaaccgaagaagccctacggcggcatccgccgctacggtccaacggaagtggcgcgagtgaagttcgtgaaatcggcccagcggttgggcttcagcctcgacgaggtcgcgcagttgctcaagctggacgacggcacccattgccacgaagcggccgaactcgcggcgttgcgactggccgatgtgcgcattcgcctggcggacctgcggcgcatggaaaaggcgctgtcccaactggtggtcgcgtgcaatacgcatcacggccaggtgtcgtgcccgctgattgccgcaatgcactaa

SEQ ID NO: 536729 - DNA, 900 bp, Stenotrophomonas maltophilia
atgcctccgcgctgcggcatttcgaggtcgaatggggggggccacctgccggcaacgccggacagtgtggcccgctacctggccgatcacgcgggccagctctccaccaatacccttcgacaccggctcgcggccttggcaggctggcatcgcgagcatggcttcgtcgatccgacccgggcaccgttggtgcgcaaggtgctcaggggcatccagacgctgcatccgtcggtggaaaagcaggccgaaccactgcagctttcccggctggcgcaagtggacagttggctcacaggcgcgatcatgacggcacgggaccgcggcgccagggcggacgaattacgccaccagcgcgatcgtgctttcgtgttgctcggcttctggcgcgggtttcgcggtgacgagctgatccgcgtgcaggtcgagcacctgcatctcgtgcccggcgaaggcatgacctgtttcctgccacgcagtaagggcgatcggcaggcgcagggcgccacgtacaaggtgccggcgctgtcacggctgtgtcccgtcaaggcgacctgggagtgggccgaagcagccgcactgaccgaaggctcgctgttccgtggcatcgaccgttggggccacgtcgcggaggacgcgctgcacccaaacagcttgatccccatgctccgccgcctgctgacaagcgccggactgccgaatgccgaagaatacagcagccactccctgcgccgcggtttcgccggctgggccaacgcgaacggctgggacgtgaaggcactaatggagtacgtcggctggcgcgacgtgcactcggccatgcgctacctcgatggcggcgatccgtttgcgcgccagcgcatcgaggcgagcctgccactgccggcgttacccactccctga

SEQ ID NO: 536730 - DNA, 294 bp, Stenotrophomonas maltophilia
atgcgcaagatccttctcagtttggtattcacggcatggatgggcctggcttgggcggcgactccaaagcaggttgtcctgcaggtggaaaacatgacctgcccagcgtgtcgcatcacgatcgaaaaagcgttggacacagtgccaggggtgacggcgaagcatattgatacccaagccggcaccgtgacggtggcatttgatgccgagcgcaccaacgcggcggccatcgcgaaggccatcaccgacgccggttttccagccacggccaaggcgggcgcgaacggtggctga

SEQ ID NO: 536731 - DNA, 357 bp, Stenotrophomonas maltophilia
atggcccaacgtcccccacagtcctccttacctgcccttttgggcgccgcgatcgcggcgattggcgcgtccgtgtgttgtgtcgtgcctctggtgctggtcctgatgggcatcagcggtgcctggatcgtcaatctcaccgccctggacgcgtggcgtccttggttcagcgcggccacgttggtgtgcctggcctgggcgttctggatgctctatggcccaacctcgcgctgccgcatcgacggcatctgcgtcgatcccacgcaattgcgacgccggcggcgctggctgtggttcgccaccgccctgatcgcgctgctgctgctctttccttactacatcggctggttcctgtag

SEQ ID NO: 536732 - DNA, 579 bp, Stenotrophomonas maltophilia
atgctcagcaagcccatgcaccggcaggtgcttctgttggccagtgcccaggcactcttccagatcgtctcggtcatcgtaatgacagttggcggtctggcgggcgcccgtctggcgagcgcgccccaatgggcgacgttgcccattgcaaccatgttcctgggcaccgcgctggtcacgtttcctgccgccatgtggatggccaaggccggccgccggattggtttcatatgcggttcgctgctcggcttggccgggggttgcatcgctgcgctcggcatcgcgcagcattcgatggcaatgctggctaccggcacgttcctggtgggcgcttaccaagctttcgcgcagttctatcgcttcgcggcgagcgaggtggcggatgaggcattccgcccgcgcgcaatttcgctggtgatggcaggtggcgttgtcgcagcgctggtcgggccgtcactagcccgtcttggcgggccgatcctgtcagcagagtaccaaggctccttcatggggttcagccgagatacgtgtaaaaatgccccacggaattcaaataattcctttggcacaacaacttag

SEQ ID NO: 536733 - DNA, 345 bp, Stenotrophomonas maltophilia
atgctcatcctaatcaacgatgcaccctacggcagcgagcgcatgtacaacgcactgcgcttggcgggggcagtgatcaagaccgggcagaagacaatcaccgtcttcctgatgggggacgcggtgtctgccgcgaaggcggggcagaagaccccggatggctactacaacactgagcgcatgctcaagcgcttggccgctgcaggcgcagatgtgcttctgtgcggcacctgcctggatgcccgcggcctggtcgacgccgagcttgttgtgggctcacggcgctcgacgctggatgagctcgctgtggtgactgtccaatccgagaaagttctcgtcttctga

SEQ ID NO: 536734 - DNA, 714 bp, Stenotrophomonas maltophilia
atggacaaggcaaagtcaatcccccagccgaagcaagcgatctaccaggccctgagcgaggtcgctcaggcgataggtcatgtgcaccgcttggagctgctggaggcgatctcccaagggccacgcagcgttgaagcgttggctgaggcgaccggattgagtgtggccaacacctcgcggcatctgcagttgctgcgccgcgcccgcttggtggagcccgagcggcagggcaagcgcattttctacagtctgtcgggcgaggcggaggtggttgcgctgttgcgcgcactcggctgcttcggcgaacgcaatgtcgctgaagtgcagggcgtcatgcgcgatttcttcaagcagcgcgatgccttggaaccggtgtcgcgcgagacactgctggaacggatggcaagcgatggcgtaacgcttctggatgtccgtccttcggcagaatacgcattgggccatcttcctggcgcattgaattgcccggcatcggagcttgaaaaggcgttggccggtctgccccgggacaaagagatcgtggcttactgccgtggcccttactgcgtgatgtccttcgaggttgtcgcaaagctcagggagcttggctttaacgtgcggcgcctggaagacggtttcccggaatggaaggcggcgggcctgacggtggtgatcgagccatccagcaatggtcgcgcagcagatctgggcgcatga

SEQ ID NO: 536735 - DNA, 747 bp, Stenotrophomonas maltophilia
atgccccaccgccaatatacggagtccgagttgagcgtcatcaatattcctcgcgatgaacaagaggccctgcgagaggtcaatgtgcaggcgttggatcgggagatttcagcttccctggatgcccgccgactaggatcgccattgcgcgacttacggctggacagttgcgggccatttatcgccgccaggcttcgcgagttcgatgtggcgctgcaggcctacgcgggagccaaggcgacgaagaagctagctgacaccggtgagcgcgcccgccgtgccggcagcaacttgggcaacgcggttcggcagatgcagcagcggattgagacgcaggaacaggaaggccagcgtttcttcgtcgacgaccaaatcattccaccgagcaatttcacgaggacgctgtcggtgcgggtggactaccgctggcgcccatcggccgaggccgagtgggcgcacggtactatcacgttcactcactcgcatgatccacgccctgactactcagtgccggccccaaagcgaaagccgagcgccagtcagcgtgcgcaggatttgcaggacgagctttggcgcgagtgggagcaactaatgaacaacgggctccattcgcttgccgagtactttcggcagggcggcgacggcgcagcgatcccgaaaactttccaggcgcgcgccgacgccttccatcgtcggctcaacaacttcagctgccagttttggctcgagccagcaggtaggacgtag

SEQ ID NO: 536736 - DNA, 1137 bp, Stenotrophomonas maltophilia
atgcgttcaatttccaatgcgttctttcaccaggccgaaattacccagatagatcgatgggagcacggtccactcgagctcgcgttcctgtccgagccagcaacaggtcgcctagaatggacagcccacctgcacaattggaatgccacgcaaagggccggatttgtgcggtcgggagaagccatcgaagggttgaagccgttcgttccttacctcgaggagcggcgcaacccgaacatgatcctagtgccgacctacggcgggaactccgagctcgacatcatgctggccggcctgttgcccgacgacatcctggccaaggccggtctcgaacgccgacgctctatgatgggcctgatgtacatgcacaacgacttgcctgcggactacggtgcgcgggcacgagctgcatttgcgcactacatctggacgcgcttgtctccgcgagcgcgtttgggtcaaggcgccttcaacgcgcgctcgccactgcgactgctcgccggcgacaccccatactgggcacaccgcctatatcgcctagcactggccaggcgcgatgaattcttcgctcctacgacgcacgaagacgagacctggaagccgctcgcagagttacgcgccggtatcttggccggcctgcctgaggaagagagacacctgttcgatatccagcggcctctgatgggcggcgacgtctgggacgagtttgatgccgacgagcgcgaggaggtgcttcagagcgcgatcgacggcgacggtgtcctcgagtcgctcgaaccggtggtcgagctgctgcaccaccaccggacgcacgaggacttctcgggcgcgaactcctggataaaagaggatttcgagcgcagcttctattccaaacgagcgaaattgaaagtcgacctagtcgagaccatcgacgatgcaccggcttatacgctggagcctaacgagccgtacgagcaggttctgttccgcgatgtgatcgcaatgctcgatcagaaagagcgtcgccttgtgatagccctgcggctcggcaagagtgcctccaccatcgcgcgcgagtcgggtctgcgcggccacgcgtcggtttcgcgacgcatcgccgcgctcaaggcgaaggtcgcccgactgctaaattga

SEQ ID NO: 536737 - DNA, 924 bp, Stenotrophomonas maltophilia
ttgcgtggtgccgtcgtcgtggtcgataagaaggcgtcggggtgggttttctgcttggcagcgcttctactggcgatggtgggctgtcgtgaggcaagcgatgagacgtgcctgcaatctgcgttgaggcaacctgaactaaccggaggccgagtcgtactgggtgagcgatcaggccatcgcttgtttgttgatctgcgagatgggtcgattgcccgttctccgcgtccattgaggatggccagcctgaccaaaccgatggtggcgggagagattcgaagacgggtcaatgccggcgtactttcgttggatgcaccggtgtctggcttgttgcccgggcacacatttgccgcacctacgggtgctataacgctgcgccagctacttcagcaccaaggtgggttcgatcgctcgcatctggacccggtactgatagatggacggaaagcctgcctggcgggtgtggagtatgtggccggaagaccgccggagcagcacccggggcgatccatcctctacagcaatgtgggctattgcctactcggggagattttgctgcgcgatccacgaggattgccggggtcgcttcagcaggcgctacagaatccattgggcggggcaggaggttggaggacatcgctgggcgaaacctacgatgccttgcggagaacacttccagtccaggatctgccaagcctgattaccttgcctgacggtagctattacggctatggatggaagcactggcccgcgaagagcgggtcgcccgcttggacgcacttcgggcgcttgcctgggatggtgtcgattgctgcgaccgacggtcatgatcgtctgctggtcgcccactttagcggtgatcctgccgacccggagagggcgagtcaacaggcagtcaggcagctatggcgatgcgttgaatag

SEQ ID NO: 536738 - DNA, 1170 bp, Stenotrophomonas maltophilia
gtgaacgttcgtcctgaatctgcagttcgggcgcgtgtcggtggctggggagccgctggtgcggtgttgggtctggtttctgcatggtgggccggtgccggtaccgccgtgcaatggatcgccttgttggctggcgctgccttgccgatgtggtgcctcgaatggagaaaaggatcaacgacggaagggggggcggatcgcaagggggccttgctgggtgtggcggtgatcacggcactacaggcagtggttctctctctccagctatccatcggcggcgatcagggggccgcggttgcgttcgcattgccgctgctgcctgtagcaggtcttgcgctgttgatagttgcggctctgtgcccgcaggtgctgggtgagacggttccagctaccgggcgcgtgtttgttcagttggcagcgctgcgatgtcctgacgcggctgggctgacggcattgctgggctggtgcgtgaagtgttttttcctgccacttatgctgggctggtcctggtcatggttggcagggctcgagtatcgcctccctgaagaacgccatctgcacttgtatatcgtcggcatggcgttgttgtacgcagtggacactgcatttggtgtgattggctatgtttcaacggccagatgtctgggaggagagatccggtccgtggacaggactcttcttggctggggggcagcgctggcgtgctacccgccgttaagtgtgcttgtactcgatacctggctgatctcccgcaacgctcatcattggcggcagtggcttgatgatggcagtgccgtgtcgatcctgtggggtgggtccattttgctcttgaccgccatctacacttggtcaaccgtggcgtttggtcttcgcttctcgaacctgacccaccgtggtgtcatcacccatggaccctatcgttggagcaagcaccctgcctacataagcaaaaacctgtcctggtggcttatttctgtcccgtttttgacaacggcaggggtgaggacggcgattgtttcctgtttggcgatgctggcagtcaatgccgtctactggctgcgggcgcgcaccgaggagcggcatctacgcaacgaccccgtttatcgcgaatactcagcgtggatcgcacgggaaggattgcttgcgtggtgccgtcgtcgtggtcgataa

SEQ ID NO: 536739 - DNA, 147 bp, Stenotrophomonas maltophilia
atgtgcgccgatcgccagctgattggcctggcgggcgtgctcggcgttctggcgcacggtggaggtcagttcctccatcgacgcggcggtttcttccagattggctgcctgctgctcggtacggcgcgacaggtcgctgttgcctga

SEQ ID NO: 536740 - DNA, 297 bp, Stenotrophomonas maltophilia
atgcgcagtgccggttccaccggcttgctcaggtcgtacagggtcagcagcgccgcgttgacgccggccagtgcctccatctccacgccggtgcgcgcctcgctggcgcactcgcaccacacgcggatcgcctgccgttccggtaccggcgcgcagaacacctgcaccagttccagcggcagcgggtggcacagcggcatcagcatcgaggccatcttggcgccctgcaggccggcaatctcggccatcaccagcgcatcgcccttgggcaggcggcgctcgacgatcagcggatag

SEQ ID NO: 536741 - DNA, 435 bp, Stenotrophomonas maltophilia
atgcggttgccggccagcggccggcactacccgtggcgtccgaagctcatgcggttgccggccagcggccggcactacccgcggcatccggagctcatgcggttgccggccagcggccggcactacccgtggcgtccgaagctcttgcggttgccggccagcggccggcactacccgtggcgttcgaagctcatgcggttgccggccagcggccggcactacccgaggcgtccgaagctcatgcggttgccggccagcggccggcactacccgtgccggtgccgcgcgttccagatgtgcgtggcggccagcagcaggctgccggtgaccgtcatcggtgtctcccagtcgtgcgagggcagcgccagcgcgccggccagcagcaggccgagcccggcgccggcggtggcccaggccagcacgggcagtgggtga

SEQ ID NO: 536742 - DNA, 219 bp, Stenotrophomonas maltophilia
atgtggggacgtacacaacgttggacctatcactgcccagcctgcggttggcttcgtatcaccccgccaacgggggatgtgcgtctgccggggctgacgcacttctcccattgcccgcagtgcaggtcacccgccgtctctggccgccccacccgcaccctcgaccacctttgggacggtctgcctgaggcctggcggaaggcagaccccaagccatag

SEQ ID NO: 536743 - DNA, 828 bp, Stenotrophomonas maltophilia
atgaccccgccgatttcctccccgacctacctgcacggattctccggcaccgagcagcagcgcctgttgacccaggcacggctgctggaatcgagcatcttcggccagatcgactacagcggcgcgcgtcgcctgctggaagtcggcagcggcgtcggcgcgcagaccgaaatcctgctgcgccgcttccccgatctgcacgtgaccggcgtggacctgagcgaaacacagctggccaccgcgcgcgagaacctggcgcgcacaccatggtgcagcgaccgctacaccctgcagcaggccgacgccggggagctgccgttcgaagcacgcagcttcgacgcggcgttcctgtgctgggtgctggagcacgtgccgtcaccagcacgcgtattgagcgaagtgcgccgcgtgctggccccgggttcgccggtctacatcaccgaggtgatgaatgcctcgttcctgctcgacccgtattcgccgcatatctggcgctactggatggccttcaacgatttccagtacgaccacgggggcgacccgttcgtcggcgccaagctgggcaacctgctgctggccggcggcttccgcgacgtgcacaccgagatcaagaccatccacctggacaaccgcgaaccggcccgtcgcaagacgatgatcgcgttctgggaacagctgctgctgtcggctgccgaccagctgttgcaggccggatcggtggacgaggaaaccgtggaaggcatgcgtcgcgagttccgcctggtgcagaacgatccgaacgcggtgttcttctattcgttcgtgcagggccgcgccacggtgtattga

SEQ ID NO: 536744 - DNA, 252 bp, Stenotrophomonas maltophilia
  misc_feature (155)..(164): n is a, c, g, or t
atgatcttcctttgcgggcgctccatttttaacaagcagttccactcgatcaggaccatttgccaaatcgaccaaatcaacaaggctgcgactatcgaaatcaccatctccatcgctgtacgaattcacattagctttagcgttaacattcgcgnnnnnnnnnntttcaatcatgtcgttcattacatccagaacgtgcccattagcttccttagacatgactttggctgcaacgaaagccaacggggttaa

SEQ ID NO: 536745 - DNA, 291 bp, Stenotrophomonas maltophilia
gtgaccgaactggaccgctacctcgatgcggccacgcgccagaacacggggcgcacctatgcgtcggcgctgcggcactttgaagtcgagtggcagggccacctcccagcgacacctgacagcgtggcccggtacctggccgcttatgcgcagaccttggcgaccagcagggatgcccgaagggcggtctgttccgcccttcgatggctaagctcgccagggatctcgaacgattcctttggaccgcgcgccaggctggcattccgcttgtttggccaagctgcgatgtga

SEQ ID NO: 536746 - DNA, 744 bp, Stenotrophomonas maltophilia
atgggcgggcgttttttagcatgggtcgcccgcgggcgcatgctgctccgcaatatggtactggcgtggcgaaggcatgacgatttgctgaaatcagtgaaatcgttttcgtgcgcaggggagggtggggcggcagggctgcgccctgcacctgctgtagtgccggccgctggccggcaacagccaaagccaaagccaaagcggctctgggtttctgctggtttggcggggcggtgtgggctggcaggacacgccgtaaacccccctccggggtccggcccagccgctggcggctgggcgttcgggcgcttgcgaagcagtgcttcgcaagcaaagcgccctcacccatgggggctcgatggcgccatccatggcgccaacggtcctgcctacccacaccgtcccgcctctgacagattcccgggatctggtagatccacgccatgcgtggatgaatctccatcgaaatcgaatatttcgagatccgagacatttgagccgagcatggctcggctctaccgcaatgcgggcagatcgcggaaatctgtcgaaggcggggtgggtccggtggcgggagtgtccgcggcatggatgccgcggccaagcccccatggacgggtttacggcgtctcccgccatcggatccatcccgccaacccacggaatgccggcttttgtttttgcctttgctgttgctgttgctggtgctgttgctgttgctgttgctgttgctccagctcgtag

SEQ ID NO: 536747 - DNA, 198 bp, Stenotrophomonas maltophilia
atgcagttgccggccagcggccggcactacccaggatcactcaagcacgtgcgcgcccagcgccgcgtgtattcgcgcggcgcgcgctaccgtcactgcctgcggctgtcgtgctgccagacgctggatgcgcgcttcatcagcgcggtggagcggctcggtgcgatcgcgcgggagctggcagctgcagcacggtag

SEQ ID NO: 536748 - DNA, 198 bp, Stenotrophomonas maltophilia
atgcagttgccggccagcggccggcactacccaggatcactcaagcacgtgcgcgcccagcgccgcgtgtactcgcgcggcgcgcgctaccgtcactgcctgcggctgtcgtgctgccagacgctggatgcgcgcttcatcagcgcggtggagcggctcggtgcgatcgcgaaggagctggcagctgcaacacggtag

SEQ ID NO: 536749 - DNA, 444 bp, Stenotrophomonas maltophilia
atgacgcttcagttcgtccatggcggtgtagaccgctacggcgcgccactgcatttccatgtccgtgacggccgcatcagtggcctcaatggcgaggctacgccggccgacggggcggaatgcgtcgacctgcagggcttcgcggtcctgcccgggctggtcgacggccacatccatctggacaagagttttgtcggcgaccgctggcacccgcaccagccggtgaacagcctgcgtgagcggttggcggtggagaaggccgcagtagcgggtgccgcgccgatggtggaccgtgccgaggccttgatccgccagtgcagccgcttcggcacggtggccatgcgctgccacgtcgacatcgacggcagcacgggtctcggccatctcgaagcgtgcgcgaggcggcgctgcgctgtgccgacctcatgcgcatccagttggtag

SEQ ID NO: 536750 - DNA, 189 bp, Stenotrophomonas maltophilia
atgcgccaggccttccaccagttcggcaccacgctgctggccggcgtccagcgacggaccgggctgaagctgcgtgggcgtgcgaacagcagttgccaccatgccagaggccagcgcatgttggcgggccatggaatcgtgctgtcggcgttgtcctgcttcaccggctgcaccgagcccatgaaatag

SEQ ID NO: 536751 - DNA, 351 bp, Stenotrophomonas maltophilia; identical to SEQ ID NO: 500971

SEQ ID NO: 536752 - DNA, 330 bp, Stenotrophomonas maltophilia; identical to SEQ ID NO: 495239

SEQ ID NO: 536753 - DNA, 1725 bp, Stenotrophomonas maltophilia; identical to SEQ ID NO: 506618

SEQ ID NO: 536754 - DNA, 2169 bp, Stenotrophomonas maltophilia; identical to SEQ ID NO: 495912

SEQ ID NO: 536755 - DNA, 198 bp, Stenotrophomonas maltophilia
atgcatcccaccacccagggcatcgatcaggacctcgccgagcagttgcaggtgctcgacaccaggttcctcctggccatcttgcatggcgacgtcgacgtcggtcgtctagcccggcgtgagctggccagccgcggcgtcgacggctcggggcgctgggtcggatttgccgaggcggggcgggcgctgggggtgtag

SEQ ID NO: 536756 - DNA, 585 bp, Stenotrophomonas maltophilia
atgatcgcggagtgcgtcaacgcggcgccggcgctcccggccatcacgcccgccctgtgtcaacgctgtggagcatgctgctctgcgtacgtcgacggtgaactggtgacgtgtcgacaccttgacaccagcaacggctatcgctgccgcatctacgcgatccgaccgcaggtgtgccgtgagtattcgtgcatacacgacgggcgagtcagcgtagcggtcgaggaacgcgtacacgccgctttccgtgaggcaatcgaccaagccaagatcgcgttcggtaggttgcccaggatgacgaatccgctcggccgttactggccgcagccggatggacttcgcgatcgcgttcgcgtttttgaaacacacgcgacgatcgacgaggccgactgggaacgtcttccgcgctacgacggcagctttccgtccggaacctaccccggcaaggcatggcgcaggggcaagttcctgtgctggtacggccgggagcgtgatgaccgcataagcgtcggttgcgcaagggcgctggtgcagacgaacggaaccaacgtcacacccccaaggaacgccgggggcaagtcatga

SEQ ID NO: 536757 - DNA, 339 bp, Stenotrophomonas maltophilia
atgaatgatatcaaagccctggccgcgcttaccgcgttaaacgagatgttcgccggcacccactttagcatctgcacgatcgacaaggtcgcgacgttgctcggcgtgcatcccgaacgagaggcctatgacaccctgcacgcgctgcattgcgtgcactgggttcgcatgcctcgggagcttcgcgatcgcgtcccggcactgatccaggaagcgctcggcaacggcaccgcgcagttccgattcgagctcgcctcgccggcgaacaacgccatgcaggtcctcgaccaaagcaagcacaccaggcggccgctgctgcagcgactgatccaccgatga

SEQ ID NO: 536758 - DNA, 3360 bp, Stenotrophomonas maltophilia
gtggaaaactgcgttcgtcgctcgccgctgatgctggccctggtgccggccttgatgctggcgtccatgacggcccgcgccgagccggtcggcaacctgcgtacggtcagcgccagcgccagccgcgacggcgtgcagggctgggacctgcagaccgacaagggcgcgcgcatccgcattgaactgccggcgaccgacatcatccgcgtgcaggccggccgcaacggcacgttgaccggcgccggcgacaaggccgcgccgatcgtgctgccgcagcccaaggcgagcgtgcaggcgcagctggaagaagacgcacaggaaatccgcgtgcgtaccgaggcactggtactgcatgtacagcggcagccgctgcgcctgcgcctggaacggctggacaatggccagcccaccgcgctgtggcaggaactgcaaccgctggacctggatgccacgcagagcgtgcaggtgctgtcctcgcaggccgatgagggctacttcggtggtggccagcagaacggccgttaccagttcaagggccgcgagctggaggtgtcctattccggtggctgggaagaaggtgatcggccgagcccggcgccgatgctgctgagcagccgtggctggggcatgctgcgcaatacatggagcgatggcagctacgacctgcgccagagcgaccaggccacgctgctgcatcgcgaagaccgcttcgatgcgtactacttcgtgggcgccgacctgcccaagctgatcgaacgctacacccagctgaccggccgccccaacatggtcgcgcgctgggcgctgtcctacggcgatgccgattgctacaacgacggcgacaacagcaggaagcccggcaccgtgcccgaaggctggagcgacggcccgaccggcaccacgcccgatgtgatcgacagcgtggccaagcagtaccgcgcccacgacatgcccggtggctggatcctgcccaacgatggctacggctgcggctacaagcagctgccggaaacggtgaaggggctggccggctacggcttccgcaccggcctgtggaccgagaacggcgtcgacaagatcgcgtgggaagtgggcaaggccggcagccgcgtgcagaagctggacgtggcctggaccggcaagggctaccagttcgcgatggacgccaaccgccaggcattcaacggcatcctcgacaattccgattcgcgcccgttcctgtggacggtgatgggctgggccggcatccagcgctacgcggtggcatggaccggcgaccagagcagcagctgggattacatccgctggcacgtgccgaccctggtcggttcgggcctgtccggcatggcctacgccagcggcgatgtggatgcgatcttcggcggcagcgccgagaccttcacccgcgacctgcagtggaaggcgttcacgccggtgctgatgggcatgagcggctggtcgtcgaacgcgcgcaagcacccgtggtggtacgacgagccctaccgcagcatcaaccgcgactacctgaagttgaagatgcgcctgacgccatacatgtatgggctggtgcacgaggccgcgcagaccggtgcaccgccggtgcgtggcctgatgtgggacaacccgcgcgacccgcatgcgcaggatgaaacctacaagtaccagttcctgctcggccgcgacctgctggtggcgccggtgtaccgcagccaggccgccagccgtggctggcgccgcgacatccacctgccggccggcggctggatcgactactgggatggccgtcgcgtgcaggccgccgccgatggccgccagctcgaccgccaggtggacctggccacgctgccggtgttcgtgcgtgccggtgcgatcctgccgatgtacccgtcgatgctgttcgatggcgaaaaaccgctcgatgaagtgaccttcgacctgtacccgcagggcgactcgcagtacacgttgtacgaagacgatggcaacacgcgccgctatcagcagggcgagtcgagcacgcaggtaatccgcgtgcaggcgccggcgcagggcagtggcccggtgcaggtgcagatcgacgccgtgcagggccagtacaacggccagctggcgcagcgccgctacggcctgcgcgtactcagccggcaggcaccacgtgcggtgcaggccggtggccgcgcgctgccggcgctggccgatgctgccgccttcaacagcgccaacgagggctggtacttcgatgccaaggaccgccgcggcaccgtgcatgtgcgcactgccacccaggacatccgccagccactgcagctgcagctggacttcgcagtcgctgccgcagccaccgatgatgcctatccggccgcaccggtgctgggccgcgaactgccggccgacagcctgctggtggtcaaccgcccggccgaagagcctggccatgcgttggagaacgccttcgacgacgatccggccacctggttccgcagcgtgcgcaaccaggccgtgcgcaccggcgcccacgagtgggtgatcggcttcggcgagcggaagatgatcgatggcatcgacatcgcgccacgcaatgacaagaactggaagcacgggcaggtacgtgactatgaggtctacctgggcgacagcaacggtgagtggggcgagccgatcgcccgcggccgcctgcagttgaaggaaggcgtgcagcgcatcgacttcccggcccacgccggccgcctgctgcgcttccgcgtgatgagcgtgcagaaccccgaaggcgacggcgccagcagcaccgacccgatggtcaccgccgcacagggcagcgcccgcgcattcgatgcactgcagccgcgcgacgtcggcccgatcgccctgtccaccttccacatccttgaacaccaggaaccggagcgaccggcccggcagcgctatctctccgagctgccggtgccggccgcgctggccagccaggtgcgcaccgaccagtccttccgtggcgacgccggcatgcgcatgaacggcctgcagttccgccgtggcctgggggtcggcgccaacagccgcatcgacctgcgcctgcagggcggctggcacctgctgcgtgccgacctcggcatcgacgacgcctgcctcagcgccggcggcctgcagttccaggtctggggcgacaaccgcctgctgtacgacagcggcctggtgaaggcgcccggcgtggtcaagccggagctggacatccgtggcctttccaccctgagcctgcgcacgctgggtgcgcagggcagccaacccgcccaggtctgtgccaactgggccaacgccgtactgatcggccaggagggcgactccgccagcatcgtcgccccatga

SEQ ID NO: 536759 - DNA, 1155 bp, Stenotrophomonas maltophilia; identical to SEQ ID NO: 496376

SEQ ID NO: 536760 - DNA, 939 bp, Stenotrophomonas maltophilia; identical to SEQ ID NO: 496375

SEQ ID NO: 536761 - DNA, 1335 bp, Stenotrophomonas maltophilia; identical to SEQ ID NO: 496374

SEQ ID NO: 536762 - DNA, 777 bp, Stenotrophomonas maltophilia; identical to SEQ ID NO: 496373

SEQ ID NO: 536763 - DNA, 1116 bp, Stenotrophomonas maltophilia; identical to SEQ ID NO: 496372

SEQ ID NO: 536764 - DNA, 471 bp, Stenotrophomonas maltophilia; identical to SEQ ID NO: 496369

SEQ ID NO: 536765 - DNA, 552 bp, Stenotrophomonas maltophilia; identical to SEQ ID NO: 496368

SEQ ID NO: 536766 - DNA, 732 bp, Stenotrophomonas maltophilia; identical to SEQ ID NO: 496367

SEQ ID NO: 536767 - DNA, 1341 bp, Stenotrophomonas maltophilia; identical to SEQ ID NO: 496366

SEQ ID NO: 536768 - DNA, 561 bp, Stenotrophomonas maltophilia; identical to SEQ ID NO: 496365

SEQ ID NO: 536769 - DNA, 564 bp, Stenotrophomonas maltophilia; identical to SEQ ID NO: 496364

SEQ ID NO: 536770 - DNA, 1044 bp, Stenotrophomonas maltophilia; identical to SEQ ID NO: 496363

SEQ ID NO: 536771 - DNA, 1224 bp, Stenotrophomonas maltophilia; identical to SEQ ID NO: 496362

SEQ ID NO: 536772 - DNA, 780 bp, Stenotrophomonas maltophilia; identical to SEQ ID NO: 496361

SEQ ID NO: 536773 - DNA, 780 bp, Stenotrophomonas maltophilia; identical to SEQ ID NO: 496360

SEQ ID NO: 536774 - DNA, 885 bp, Stenotrophomonas maltophilia; identical to SEQ ID NO: 496359

SEQ ID NO: 536775 - DNA, 132 bp, Stenotrophomonas maltophilia
atgctcgactcgccgtacaagcagtcgagcatggctcgactctacagaacgaagaagggcggcctctcggccgcccttctgaggttttacttcttctcgacggccgactcgaccaccatgtcgagcacatag

SEQ ID NO: 536776 - DNA, 801 bp, Stenotrophomonas maltophilia
atgatccgatcgcacctgatgccgggcattgcgtcgatgctgctgctggcctgcagcgcctgtgcgccggccggcgagcgcactgccccggcagcgtcccctgcggaagcggcaacccggccgatgcagccgctggcccctgatcgcggcttgcccgcattgcctgaagcctccggcagcgcctcttccggtggcggttacggcgcattgcccgaatccgtcaggcaggtactgacgcagttgaagtgcaatgtggacgcggccagcaacgtgcatgtggtcaccctccccggacagggcgggcagcaggatgtcatggccaccgaccgcagtggagcgcgcttccattactggatccgctcgtttgccggcagcggcggcagcaccggctatctggtgcagttgcaggactgcccgaccagcaccgcaggcatgcgcgcctacgttgcgaaggggaccgcgccgctgcaggacgtcaccgcgtcgctgttggcgcaggccgacctgcccgatgcagcgatgatgtcgtcataccggtccaagggcgcaggtgatctgttcgccttcatcggcgtgctggacaaggtgccggtgctgcgctgggtggccgaggccgatcccgagcagccgctggccgccgatgcacgcacgttcgaccacggcaacgctgtccatgccggcttcctgcgctggaaccaggaccatttcgaggtggccaggaccgttcccgccgcgctatggccctgtgacgacagcccgttgctgccgtgcaagggcgacccgttcgtcagcgggcgttga

SEQ ID NO: 536777 - DNA, 744 bp, Stenotrophomonas maltophilia
atgaacgtctgccttgctcctgtcattgccctgcttgccgctggcctgataccggccgctgcgggtgcttcaccccagaccgccaacgcccaacctctggcgttgagttgcggtgccaccgagttcgtcggcatgaccagcaactcgtcgacgctggccaagcgccagtgcaatggtggctacgtctacggaatcggcgtctcggtcaacgaagcggtggagaacctcaatggcttcatggccgtgctgcaggccggggtcagctgcagcgcggatgccaccagcatccagactggcgcctatggcaagggggtctacgccagcttcgtgtgcaacggctggccgattgcgggcgtgggcaacagtcccaccacggccgcgcgcaactcgctggcgatcgccaccgaaatggcggcaaccggcacccattgccgggcgcccttgagcggttcctactatccggaaagctatggtttccgctaccactatgactgcggcaacacccgcaccctgatgacctggtcgatcagtggactcggtgccagcatcgacgatgccaacaccattgcgatgcgcctgatgcgcttctcgacagccaccgggcaaagctgcagcttcgacagggccgagatcaatggtgtcattctcaaggccccgctgacctgcaacggatcgctcatcctgggctatggcagctcggtgactgccgcggccaatgatgcattggcccagatcggcgcctga

SEQ ID NO: 536778 - DNA, 867 bp, Stenotrophomonas maltophilia
atgcagtcgaatccggacatcagcagcggcctgtatcacgggcttgaggcctggcacgtgcgcacgaccagcgccacggcggtcatcagcgtgttcggcgggcagctgctgtcgttcattccgcagggacaacccgatctgttgtggttgtcgcccacgcgcgccgaactgccgacaccgatccgcggtggcgtgccggtgtgctggccgtggttcggtcgccagggccagggcgctgatgctcccgcgcatggccgggtacgcaccgcacgctgggaactgctgcacgtgcaccagagcgataccggcgtggtggaactgcagcttgccccgtcactgtccgatccgctcggtctgcgcctgcagatgacgctgcgcatcggccatcagctgcaccagcaactgaccaccgagaacacggggtccgctccggcgacgttcacccaggccctgcacagctatttcagggtgggtgatgccacccgtgtggacgtcgagggtgtcgacggcctgcagtacctggacaagtacgaggactatggccaggcgcgagtgcagcaggggccatggtcgttgcgtgacccgcgtgatccgggtcgcagcgaccgcatctataccggtgcacagggccactatgtgcttcgcgatcccgtcctgcagcggcggatcgagatccgcagcgaaggcagccagaccctggtggcctggaacccgggagccgaggccgcggcgaaaatgtcggatgtcggcgagggctggcgcgactatgtgtgtctggaagtggccaatgccggtctcgagccggtcacgctcgcaccgggtgcgcgccatcgactggcgcagaccctctccagcgaaccgctgtag

SEQ ID NO: 536779 - DNA, 774 bp, Stenotrophomonas maltophilia
atgcaggaagcacagtggtggtatgccaacagcaggcagagcgaaggaccggtggacctggccggcctgcgtcgcctgcggcaggaaggtacggtgacggcgcgcacgctgctgtggtgcgaaggcatgccgtcgtggcgtccgttgtctgagctggaacaggctgcagcgcccgtcgaggccgctccggccgcggagttcgacgcagccgttgcctccgggagcagcgcacccagcgtcggtgatccttccgatccctaccgtgcaccggcggtcgcaacggacaccgccgtgacggcggggctggaaggcgaaatggcactgtatgccgccgtggtcggcggcaacttcccgatctatcgccagcgctggcggctggatcagggcatcgccacgggcagcggcacctggcactggccggcgttcctgctgggcctggtctggatgatgtaccgcaggatgtatcgcctcgcagcgatgtgggcgggcctgctgctgctgatcagcgtgatcgagacgctgctggatgtgcctgatggcctgtcgctgatcatcactgtcgcgctcagcatcactaccggtgccttcggcaatacctggtacctggcacattgccagcgcctgattgcccgggcccgagcggagagccgtggcgacgagacacggctgcacagtgagctgagcgcgcgcggtggcaccagcgtggtcgccaccgtgatcgccctcgtcatcgcggcggtgctgagtaccgttggtgcaggattggccgggtag

SEQ ID NO: 536780 - DNA, 216 bp, Stenotrophomonas maltophilia
atgcgtgtgccggcggacgcgccgccagcggcggggagtctggacctgccgggcatgcaggtcaacccggggccagccggcaccgttgccggcacgcgtgtcctcgtgcgtacacgcaccggcgcgcataatgtggccgtggcgttcgccatgctttccctcctccgaacggacgcgcggccggttcccccgatgaccaggtattcccatgcatag

SEQ ID NO: 536781 - DNA, 267 bp, Stenotrophomonas maltophilia
atgaccccttcgcaagcggaaaccattgccagcgccgttatgcagccggacgaccggcgcgccgagatcgccgcgcgccagcaggaggagctgcagcagctgcagcggcagcgcagggcggccgccatcggcttggcgggcatggctgcaggggcgttgatcgcctaccagtcgggcctgccctgggtgaaggggctgctgtatggcggcgtgccgacgttcttcatcgccaaggtgtggttggatcggcgcgcgttgcgcggttga

SEQ ID NO: 536782 - DNA, 2721 bp, Stenotrophomonas maltophilia
atgagtacctaccatttcctgctcagtgacagggaccgagacgctgttcgagcggtgagagcgtttctgcacgggcgccttgctgagcaatcgacaattgactgggcactaagaaccaagccatatgagattgttaagcgcatggcggtgctggagtccttggagtttctcaatccccacgagcttggtgagccctggtactcggcttggcggctgatcgagcaaagctgggaggaggagacgctaaacaacgcctccagtgatgcccaccacctgcagcgtcgaattgatgccggcgagcgatctggctccttgatcgcgtcgatcactgccctggtcaagcctcggctcaaaattggtatccgttcgcagccatctcatggaccagcggcaaagcgcccccgccgtgttgaggacgtgttcttcgcatcgcttggaagccacgagttgatgaggccagagatttttagacttgatcgcatcgaggatgtggactttcttgtggctctggggaccgttctggaagggggagtcagtagtggcttgagcctgggccgcaggctcggatggaagggcgaccacaaattctggcaactgggggatctctactacgttgcctacctcacgcagggtgatgaggcgcacaactgggatatcgacgagtttcatcatgggatctcgccatcggtcaaactgctcaatgcggttgtgaagcggatcgctgcactcgacgtcccccaagcgaaggcgttcgtttctcgctggagtcagatcagcacgccagtgcaccttcgcctgtgggcatcgttgtcgcaaaaccccgatctcgccgcaccagccgaactgactgagttcctgctctccttggaagacaggccgttctgggacgtccatacgttcccagaggtggccgaagtgcggtcgcttcgattcaacgacgtgtccgattcagcccagtgtaagattgtggctcgcatcaagcggggtccgcctgcgacctactggccacgcggctcggatcgcgatcgcgtcaacggcgcccgacaatactgggccgtccgtgagcttcggcgcattgaggtcgctggtagccagctcgatccgtcagcatcgctgtggttggctgaacgcatcggcgggcatcccgaacttgcgcagatggattcggtccagtttgacttcctctcatcaccactgtcacgcggggaggcaccggcgccagaggatcgatacgaccagctgtcaggccaggaacgcttgagcgctcttgaagcagcgcttggctcggtccgcagcagttgggacgatgaccctgctgaacgtgctggagcatggatcagcactgcagaaaacgcagacagcatcttggctgatctggagaccgccttggaaggcggcagggactaccccaacgtgtgggatcgcttcggctggagtcatagcgccccgagccgcgagaccgaacaatcaccgggctacctgcaaacggcccagcgcgtactgaacctactcagacttgtcccaacctcaactctggtgcaagcgattcaaggcattacccattggatgtcagcctggcagcgtgtcatcacaaaagcgccacagctgcctgctgtgtggacgacgctttggcccgttgccgtcgccgctacgaatggatccgaagacgttttagataccgtcacgctggacgaatccatcacagccgcccaagatctcgacgttgagaagctagacaccctcaacacgtccgccgggcgcttggtaggcgtgttcctggcgttgtgcccaagcatcgtggggaaccagaatccgttcgcgacgagcagttcattacgtgccatgcgcgaggcgatcgcttccgctgagggcagatcaggcctgatcggtcgacaccgcctgattgaatcgcttccttacttcttagaggccgatcgaggctggtcacgtgagaccttgattgggccactactcgccaacgatgccggttcgctggctttgtggcgggcagtttcgcaacggaatcagttcacctccgtgttgaaggagatcggggactactttgctgaaagagccctcgacagacgactgggacgccaatccaggggctctctgctctccagcctcgtgctcgaatcactccatgcttaccgtgaggttcgggagccagtcgtcccgaatgcgaaggttcagcagacaatacgatctgttgatgacgaggtacgcgccacagctgcacagatcgtgcagcgctttctgattagcatgtcaaagaccccatctgttcagcctggacagtctgcggaggatgtgtttcaaggctcgattgccccgtttctcgcgaacgtctggcctcaggagcgttcgctggccactcggggcgtcgctgccgcttttgccgacctacctgctagcgccggcgacgccttctctgaagcagtcgatgctatctcacggttcatcgtcccgttcgactgttggtcgatgcacagtttcggctttcacaccggcccagagggaatgccaggcctggagtccatcgacgcacctgcaaaggcggcggcgctgctgcacttgctggacatgagcatcggtgcgactgagggatcggtcgcgcccatggatttaccggaagccctagagcagatacgacgcgcttcagccaatctggcgcagcagcccgccttccgacgcttggccgctcgttcacgctaccgctag

SEQ ID NO: 536783 - DNA, 765 bp, Stenotrophomonas maltophilia
atgcgattggcagaccgaggcgcaggtacagcgatcgttaccaccaatttcgatttgctgctgcaggccgccagtccggcgaagcggaaaccccaaacctacgcgctcggcggaatcccgagacccacctggagcagtgaattttccggtgtctttcacatccatggcgcacttgatcctaacctccagcgtaccgccgacctgatcctaaccgaccaggattttggcgagttctacatgcgtcgacgctccatccctgacttcatctacgatgcggcgcgcctgttccatattgtcctgatcggctacagcgccaatgatcctccgatgcgctacctgctcagcgcaatcgccgcagacggggtccgcttcgacgatctcagggagcgcttcacgtttgtcggttccaaggcaccggatccggtccagatcgaggactggaaaggtcgcggcataacgcctatcgcctatgacgagaaggagcatcacaaggccctattgggcctgcttgagcgctgggccgagctatcggcggtcaatggcgatccgcgacgagtcgatgcaaccatcaagcgcatcgtgaggctgcccagaagcctagccaccgaggctgatcgtgatctatttgatcatcttctgcgtcggggaaattctactgatcgcgttcgactgtcgaacttggcgtcccgggccggcgcggacatggcctggcttgatgccattacgatgatcgcgcttgagaaagacagcgagatctcggcatga

SEQ ID NO: 536784 - DNA, 612 bp, Stenotrophomonas maltophilia
atggatgaaatagaaaaactaaaattggcgagacagtcgctgcggcatccactcaacgatacgcgccctcttcaaagagatgactatttcaagattggactgttcatccaaagctattgcttcgcagacctagaggcaaggcgcctcatcaatcttctggatcaaatccagacgggaaggccgacttcctatgcgttgaagctaaatgataaagatactattgatcactttaagagccacgcggcacgatgcgtatggaataaagaggtgatgaatgaactaggaaaagtggctgacatcctaggcgcgcatcggaaaataagacacatgttcgcccattgggcagggcgacgaattgacggtcaccccgtctatattttctttacggctaatctggctggtcaaaaaattccagacggggcgccaatacttgaacaaagtgacgaagcaaacatccagtatgggctcatgccaattccccacctcgagcgagagctcgagaagctgaagggccatatcgagtacatggcgaacattggacatcaactcgaagccaaagtgttcgaaatcgccaagcagttcagtgaggacagaaagcagggaaaattctga

SEQ ID NO: 536785 - DNA, 255 bp, Stenotrophomonas maltophilia
atgcttcgaaccgccacgccactggtcattctgctatcgctcgcaattccttcggcagtgtccgccgcaagcccgccctcgacgcttcagcaactgctggcggaacaccgctacagctgcaaggtatacgtaccgcaatcacaaccattcatcgagtacgtcactgcgtcttcagccgaggaggcacgccgcaaggtggaggcgaatctgccgtcgggctggtgggtggacccttgccaccgcgtaggaggctga

SEQ ID NO: 536786 - DNA, 726 bp, Stenotrophomonas maltophilia
atgcacatgctcgaaatgcgttcggtcgccaaggtcttccgcaccgaacaggtggaaacccacgcactgcgctcgctggaactgcaggtcaaggaaggcgagttcgtcgccgtcaccggtccgtccggctccggcaagaccaccttcctcaacatcgccggcctgctggaaaccttcaccagcggcacctacatgctggacgggcaggacgtgagcacgctgggtgacgatgcccgcagccgcctgcgcaaccagaagatcggcttcatcttccagggcttcaacctgatcccggacctcaacctgttcgacaacgtcgacgtaccgctgcgctatcggaagatgagtgccaacgaacgccgcgagcgcatcgagaaggcactgagccaggtcggcctcggctcgcgcatgaagcactacccgaatgaactgtccggcggccagcagcagcgtgcggcgatcgcgcgcgccctggccggcagcccacgcctgctgctggccgacgaaccgaccggcaacctggatacgcagatggcccgcggcgtgatggagttgctggaagagatcaatgcggccggcaccaccatcgtgatggtcacccacgatccggaactggccgcgcgcgcgcagcgcaacgtgcacatcgtcgatggccaggtgaccgacctggtgcgtgagccggtgctggccacgccggtgcgccacatcgtcgccgtcaacgattga

SEQ ID NO: 536787 - DNA, 387 bp, Stenotrophomonas maltophilia
atgtctacccgcccgcttttcccacagctgcacgccctgatcggcgaagccgccgacctgctgcccaccgacgtcgccgagcgcgtcgaagatctgctcgatgatcccaaggatctgctgcccgccctgctggcccgcatggatggtcgcgacggcgccgacggccgcaggctggaagtgccgggtgccagcccggcgcaggcaaccacgatggcaggcctcagccgcacgcttgctggcctgaacaccctcatccagatactccacgccgccgaaaccgcgcgcgagcagggcggtacccgacagcagctcgatccggatgtggtcgatggcctgctgctgggcgcccgcgaactggcccgctacgcgcgcctgcagctggagtag

SEQ ID NO: 536788 - DNA, 417 bp, Stenotrophomonas maltophilia
atgaagaaccagaagggcttcacccttatcgaactgatgatcgtcgtcgcgatcatcgccatcctggccgccatcgctctgccgatgtaccaggactacgtggccaagtcgcaggccaccgccggcctcgccgaaatcaccccgggcaagacccaggccgaagtgctgctgaatgaaggcaaggcaattgctgacgcggaagccgttggtctgaccaaaacgactgagcgttgcgatatcagcgcaaccggtgacgccagcaagggcactgcggagatttcctgcgtactgaagggcaatgcaaaggttgcgacgcacaccctgactttgtcgcgtgcagacaccggtgcttggacctgtggcgccaagggactggacgttaagttcatcccggctggttgcactgagaccaagtaa

SEQ ID NO: 536789 - DNA, 885 bp, Stenotrophomonas maltophilia
atgaagtcatccacgctgtcaggattagcagttgtcgcaatcctcattggatcaaccgccatcggtctggcttttcgcaagggtgagaccaattccccttcgccagcggcagtggttgaccggcaagaagcggtacatggcaaaaccaccgagttcaatgacgtagcactacctccctacgcgagaagagagataggccgttcgttcgtattcgctcgcggcccggagttgaggccgtcgggcgacccgcgcgcgtggatcgactcgctcatgccagcagctgaagcaggcgacgctgaagcttcctacagcatctacctggccctgatggactgtgagatgtacctgaaggcgagcgcgcccgaggaacttgccgaatccgagtcaattggcgcctcaaccgagtatcagagaacggtgcttagaaagctcctggagtgcgaatcaatcctgccaggccaagccgcccggactggatactggctgtcaaaggccgcacgccagggatccatcgaagccctggtcgcatatgcagccaatccgagcgccgtacttggaccggcgccgaacatggaatcggaagagttccgcgcctggcaaagcaactccatttcgtaccttcatgaggccattcaaaaagggagtatcgacgcactcgcacagctttcaaacatatacatggctggctacgccacctctcgcgacccccaaaaggcgtatgccttgcagcttgcgctgagcgaattcggcccgagcttctccagcgattcctacagaaacagcatcgcccgagaactgacaccgaagcagatttcgcaggcgcgcgaagcaggaagggaattctttcagatgacaacccataacaaaaggacgatatcaccatga

SEQ ID NO: 536790 - DNA, 273 bp, Stenotrophomonas maltophilia
atgacccacggcaacgtaatcaccatctgcagcggtagcaattgcgtttcttacacgaagaccgacggtcgcaactttgaaggcggccccatcaagccgcttgagcagggcaacccccgcggcggcggcggcggctcaggcaagtcgggcgggccatacgatggatcaagtgctgatggtcgagatcgcaagggcggcaatgcccgtgagaacgagcgagacggcaaggactacaccggaagggtcactgtaggaaagtggaccagaaagtga

SEQ ID NO: 536791 - DNA, 1119 bp, Stenotrophomonas maltophilia
atgccgcctctttggggggctcgagctgtgaacagaaagaacgaagacatccaggtgctacgagcggttgccatcgtgatggtggtcctgcagcactatcgcagccgccttccaactccagattggtatcaagggatgttcgagcatgtctcgttctgggccggcgtcgacgttttcttcgcgatctccggctacctgatctaccggactttttctcgcgatatgcagcgtgctgacaccaaatcgtctgctctcggaagctttgccgtccgtcgtttccaaaggctctatccggcatgtctgctctgggtgattgtgtctattgcattggctttcgtacttacgaccgcccctaatggtgatccatggccaatcatcaagagcggtattgcgggcttaacgggttggtcgaacctgtattacgtcatgtgcatacctgacctcgtcgtctgcgggaatccggacttcaacggggtgacttggtcgctgtcagccgaatggcagttctacgctgtcctttctgttgccatgctcttcatggggaagcgggttgcggtgctcggcctactgggagtcgctgtggtgatgtccgccttccccgctccgtcctggtcctttttctgggcctttcgaccgcttgcattcgttctcggcgcgcttatagcaatgaccacaggggaaaagcagttcaacctgcctccggtggtcaaccgcttgctacttctcattggggtggcggtgaccctcattgcgccggttagcctccagcaacctttcgtcgttccagccatttccatgggtggtgcgctctgcttattctcagctctgtctggcaacagctactccggacgactcagtgggctggcccgttggattggtgaaagatcgtattcgatctacctctgccaccttccttcaattttggtggtgcgcgagatcctgaccagaaccatcggcaccgacgtcaccttcggaaatgtcgcattggcaatggtcagtaccgttaccatgatcgccctactctctgacctgtcctatcgcttcgtagagcttagattccagcgatcggcacatacgcgatcgacacgacccattcctgcgagggccaccgattcctaa

SEQ ID NO: 536792 - DNA, 1164 bp, Stenotrophomonas maltophilia
atgaacgttgcttttctatttaactcggatcattcagagctcggtagctactacggtggcccaataatggacttggttctgggcgcgaacgtattgcagaatgaattgcgccccatgcgagttctggtgggtgacatactgacgttcagtgcggtatctcagagcaaagatcgcacctatgccgcgctggatcgattgtgccgctctgtgtatgtgccggcgaccttcgatcgccttaagaggcgaaatttggaggagacgttcaccacggccacagtttattgctggctgttccagaacatgacccagagtgcagcggagcagcttcaccgcaagctgttgcctgtttcgttctacttgggctgtatggacgtggatttctccaatccaattcacttgcagttctttcggaatagtttggtcgagaactatcggctggcggggacaaaatgcgccatcttctatagcatgggggagaatgaagagccggacatctctatcaagcaggtgttcgagcgcagaggttttgaggttgagttcgaggatcggggtgctcgccgcagtatgttcgacaactatgactcgctcgagcacttcaaacgtgtggggtcattcacgtccttttgctcgaaactgcctggcctgggagacgacgaagcggcggggcttgcgcacagcttggaggagctacacccgagactgttcgacgcatttgctgctgcagcgcgaaccctggagcgcgccgaaacagaagaagactatgctcaagcggccctctcggggcggcggcttctagagcggactgcagatgccttgtttccgccgcaggaaggtgaatggaacggacggaaggtcggtcctgcacaatttaggaatcgcctttgggctcatattgaaagggctctttcggctaatggtgattcggccagtcgcctgcaagctatgggaaaagaggcggacaggcttgtggatctgtttaattctgggcttcacgcaagccctacccgggaaaaggttgagatggcattccgtgatctcattatctggctctccgctgtcattgacataaatccgtcgatggctcggaatccatatcagccatacgaagtcgaactcaaatcattcctgcgttcagtgttgtcgaattccggagacgaggtctaa

SEQ ID NO: 536793 - DNA, 1365 bp, Stenotrophomonas maltophilia
atgagcttccccgcgtatccggcgtataaggattcgggtgtcgagtggctaggagttgttcctgatcattgggtcgttgcattgttgaagcggggttatgaggttgcactaggcaagatgcttcagcctgaagcccggcgcgatgatgacgaatttctgccttatctaagggcagcaaacatccagtcgtcaggtgttgataatgtggatgtgaagtatatgtggtttagcgcagaagaaaagaagttgctgctgttgcgcaggggggacttgctagtcagcgagggtggggacgttggtagatcagctatctgggatttcgagaatgaggagtgttacttccagaattcaataaatcgaatcaggtcggttgacggaaatgaaacgcggttcctgtatttttggatgacggccatcaagaaaaatggctacatcgatatgctttgcaataaatcgactattgcgcattttacggctgaaaaagttgctgccgtacctatgccgctaccgaccaaatttgagcaagttcaaatcgcacgttttctcgaccacaagaccgctcacattgacgcgctgatcgaagaccagcagcgcctgattgagctgctcaaggaaaagcgccaggcagtgattttccgcgtcgtcaccaaaggcctcaatccgacggtgccgatgaaggactcaggtgttgattggttgggccaagttccgcagcattggcaggtcggagcgttagggtattttgctgggattgatactggggctaccccggatagaggcaatcctaagtattggggcggtgatataccttggatcaagactggtgaggtaaactacgacaacatttctcaggctgaggagtgcataacccgcgaaggtgtgaggaattccgctgtcaaggttgctccgaaaggaacattgctgatggctatgtatgggcaaggcgttactcgcgggagggtggcgattttagatattgaggctgcatataatcaggcctgcgcgggaatctttgtggatggtcgtattcgtgtggagtatctgcgcttgttcctcattgctgcgtatccatatgttcgggacggcggcaacgaagccagtcaaatgaatttgagttctgggcatgtcgcaaaaataaagatcgcggttccgcccataattgagcaggtatcatcagagcgttttcttgatgaagagatggcgcgcttcgactctttgattaaccaggccggattgttggcaagtaatcttcaagaactccgatccgcgctaatttccgccgccgtcaccggcaaaatcgacgtgcgcgcctggcagtcaccagccagattgccagctcccgaattagtacaagaggtcgtgtaa

SEQ ID NO: 536794 - DNA, 225 bp, Stenotrophomonas maltophilia
atgaattaccggttgcaggtctaccgccacggcgcctgctggggccacttcgactgcagcgggcccgacgccctgcagcgcctggacgccatcgcggcgcagctgcctgccgagcagggcttcctgctgaagcggcagaaaggtatcggcgaggagcgcatcctgtccagcaacgctgacggcctgcgtgtgctcgccgcgcagatccagtaccgcgacctctga

SEQ ID NO: 536795 - DNA, 657 bp, Stenotrophomonas maltophilia
atgacggcaggcagtttccgcgagaagggcatctcgatgacggcgctgacgctgtccgtgttgggtgtggcgtttgccgcatctgccgccgaaccggaatccacggtatccgaaccgcctgtgttcggcgcctggcgcaacctgcagaccgaggccggttacaccccggcgcagcgcaacctggcctttgcgatgttgccgcaggcggccacccgcggggaccggttcgccgttctcgaccgtgaaggcaagcggccggtatgctgcctgcaggtcgccagtacgtcgctgggcgtggctgcgctgcgcgatcagtaccatctcccgcaggtctgggtgaacgacctgagcaatggccgcagcgccgcgcgtccctatgtaccccacgtctatgcgatgcagcgggtggacgagctggccgactatggtttcgccgacgtgccgggcgcctacagcgacctgggcggcctgctgatgccagaaggcactgcgctggaggccgatggcaatgccgtccgcctgggcgacacccgttattccctgcagttccagcgccagccgcacgccgatgacgatggcgcgctggaccgctacacgttgcagccaggcgggggcgcggcgccgatcgtggttgaagtgccgttcggcacctactga

SEQ ID NO: 536796 - DNA, 537 bp, Stenotrophomonas maltophilia
atgagccgggcgcggttgtttccgttgctggctggtatcggcatcgtgctggtggcgatcatgctggcggcgctggcgtggcgggtggagctgatggggctgccgcatccgcaatggttgagctgggcacaggcgatttcggccgttacccgctactcgcagaactcgcagttgggtctggcggccgacgtctactacgcgctgatgccgctgttggtgccggtctctgcgttctggtcgcaccgcgcgctctgctacgacgctgatggccgccccagcgcctggcagagacgggcgttccggccggcgcagcgtcgtgccggggtgttcgcggtgccattgttcgccgcgttgccggtaacgctgttgtgcctgttccggggcggcgacctgctccggctgtcgatccagggcaacttctgggcgatggcgctgaagggctggctccccttcttcgtgtgcggggtggccatcgccctggtggtatcgatggtggagaagctgttgcgacccgcatccgccaacgcaggcggctga

SEQ ID NO: 536797 - DNA, 5598 bp, Stenotrophomonas maltophilia
atgaacacgcagacctggcagttgcccaagaattacgtcatcgatccggacaccggtgatatgacgatcttcaaccacgacgggtcgatcaccgtgctgcggaaagacccggcgaccggtgcctattcgctggagcacaacggggtcaaggtcagccaggatcagttcaacctgtcgatgctgtggtcgttgatgaaggagaccaccaaggcgccgggtatggaagggccggacatacaggacgtgattccgctggtgcttgccgcggccagcggcgacggtgccaagcacacgttcctggacgacatggccaaggcgctgaaagcacagagcgaggccgtgctggccggagtctcacggcagacggcgcatgcgcagttcctgcgtgatgcatcggcggtggtgcagaagaacagtgcgggcatggcccagcatctggatgcgagtgcacgggccaccctgaacaaggcgctggccggactggcgaaggccgatgcactggaaatccgtgcagcgcgcagtggccgcgctgccgatctgatcgacgcgcgctacggcaagatcggcgccgtgctggatgtggtctcgctgctgtcggcactggccgagggtgacagcaacgagattctgaagacgtcgctcggcattcttgccggcatcgttgccggtagtgcggccgccttctttggcgcgcccatgctgctgggccttggcatcggcctgctcgggtcgtggggagcgggcctcctgtacgacgcagtgatcggaccgaacatcggtgatctgggtaatttctgggacaacctgttcggtgcgctgggtctgggtgacggcgtgggcggcgatttcgccgcggcccgcaaccttgtgccgcggcgggatccgttggcgctggacctcgatggcgacggcatcgagacggtaggggtacgcgccggcgtcctgttcgatcacgatggcgacggggtgcgccagggtaccggctggattggcccggacgatgggctgctggtgctggaccgcaatggcaatggccggatcgacaacggtaccgagctgttcggcatcgacacgcccttgccggacggtagccaaccacggtccggatttgcggcactgtcgagcctggacagcaacggcgacggcatcttcgacgcacgcgacgcgcggtttgccgatgtcagggtgtggcgcgatctcaaccaggacggcatctcgcaggccactgaactgttcaccctggaggggctgggcatcgcgtcgatcggcctgaccccggacagcgccgatgaccagaatctcggcaacggcaacatcatcgacaaccacggcacttacgtgcgcaccgatggcagcagcggtgccattgtcgacatgcagttcgcggtggagaacttctatcgcgaattcgaccgcgggacccatccggtgaccctgctggacgcggtgaaggcgttgccggacctgcgcggctccggcgcggtgcgcgatctgcgcgaggcggccagcctgtcgccggcgctgttgcaggcactgcaggcggtggtgcctggcatgtcacgcgacgcattgctggccaggatcgatggcatcgtcaccctgtgggccgcatcgtcgggcatgaagaccggggaagagatcgtcgagggcgaagccggtgggcgcaccctgcgttaccacggcgttgttccgcagtcggtgcaagcacagggcgagagcgctgtcagtgcctggaagaccgcgcagcacgccacgctggggccgatcatcgcgctgcttgagcgcttcaatggctcgaccctggtcagtatcagtggcgaccgtgtcagcaccggcggccgcggcttcggcggcggcgcgatgcagaccgagatcgatgttgagttgtggcccgaacagatcgccccgctgttgcgggcgcatgccgccctggtggattcggtgtatggcgccctggccctgggcgtgcgcctgaaggacgtgatggcgtcgttccggccggtgttcggcagcccgggcctgagctgggacacggcgggcatgacggcggcactatgggcgaaatggcagggcgacacgctgggcgccctgcaggacgtgatggacatcaagcgttacgccagcgcacagatggaaatggcggattggcccggtctttcggtcctgaccgagatggtgcgccagacccgtgcgctggccggaggggaccaactgctggcgcaggccggcatcagcctggtccagggaagcgccaacggcggcagcggtcaggattggctgtggggcgggaccgcggcggatacgatcaacgcgggggcaggcgcagacttccttgtggggggggaaggcgatgacaggttgaacggtaacggcggtgacgacgagatcgccggcggggtcggcaatgaccggcttgttggcggtgatggcagcgacgtactgctgggggagcagggcgacgacaaccttgaaggtgaaggtggaaacgacctgttgatcggtggtgctggcaacgacaagctgcgtggtggtttcggcaacgacacctatcatttcgacctgggctggggcagtgaccggctctacaacgatgacaccagcagagggcggactgacatcatccgcttcggcgccggtattctggccggcgatatccgggtgagccgttcgtacagtgacctgttgctgacccatgccaacggtgatcgcgtcaccgtcgacatgggcctttactacgatgcgctggcggataccgccttccgtatcgatgaggtccacttcgatgacggaaccatctggaccatggagcagatcaagcagatgctgctgcagccgaccagtggtgccgacagcattactggctacgccaccgatgacaccctgcgtggaggggagggcaacgacaagatcctcggcgaaggcggcaacgacacgctgtatggagatgccggcaacgacgatctggacgggggcgccggcaacgatgtgctgatcggcggcagtggcaacgatatcctgcgcggcggcaatggcagcgatacctaccgtttcgaactgggctggggcaacgacaagatcgtcgccagcgacaccggcacgggccgggtggaaacgatccagtttggcgaaggcatccttgccagcgacatccgcctgagccgcaccacctacgacctggtgctgacccacagcaatggtgatcgcatcaccgtcgatatgggtctgtacaacgatgcgttggctggaagttattaccggatcgaccaggtcagcttcgccgatggcacgttgtggagcatggaccagatcaagcagatgctgctgcaggcgaccagcggtgccgacagcattaccggctatgccaccgatgacactctgcgtggaggcgagggcaacgacaagatcctcggcgaaggcggcaacgacacgctgtacggagatgcgggcaacgacgatctgcaaggaggcgctggcaatgatctgctgatcggcggcggcggcgatgacatcctgcgcggtggcgctggcagcgacacgtatcactttgatctgggctggggcagcgacaagatcgtcgccaacgacaccggcacgggccgggtggaaaccatccggtttggcgaaggcatccttgccagcgacatccgcctgagccgcactacctacgacctggtgttgacccacagcaatggtgatcgcattaccgtcgatatggggctgtacaacgatgcgttggctgggagttattaccggatcgaccaggtcaacttcgccgatggcacgttgtggagcatggaccagatcaagcagatgctgctgcaggcgaccagcggtgctgacagcattaccggctatgccaccgatgacaccctgcgtggaggggagggcaacgacaagatcctcggcgaaggcggcaacgatacgctgtatggagatgccggcaacgacgatctggacggaggcgccggcaacgatgtgctgatcggcggcagtggcaacgataccctgcgcggcggcaatggcagcgatatttaccgcttcgatctgggctggggcagcgacaagatcgtcgccaacgacaccggcacgggccgggtggaaacgatccagtttggcgaaggcatccttgccagcgacatccgcttgagccgcaccacctacgacctggtgctgacccacagcaatggtgatcgcatcaccgttgatatgggtctgtacaacgatgcgttggctgggagttattaccggatcgaccaggtcagcttcgccgacggcaccctgtggacgatggaccagatcaagcagatgctgctgcagcccacctccggcgccgatcgcctgttgggctatgcctccaacgatcttctggacggtggcgagggcaacgatgagctggacggggccggtggcaacgatgtgctgatcggtggcggcggcaatgacatcctgcgcggtggcgctgggagcgacacgtatcactttgatctgggctggggcagcgaccggatcatcgtcagcgacaccggtgctggccgggtcgaaacggtgcgcttcggcgccgggatcaccgccagtgatatccgtcctggccgcgccggcagcgatctgctgttgacgcacgtcaatggcgatcgcatcaccgtcgacatgggcctgtacaacgacgcgttggctggaagttactatcggatcgaccaggtcagcttcgcagacgggacgttgtggagcatggaccagatcaagcagatgctgctgcaggcgaccagcggtgctgacagcattaccggctatgccaccgatgacaccctgcgtggaggcgagggcaacgacaagatcctcggcgaaggcggcaacgacacgctgtacggagatgcgggcaacgacgatctgcaaggaggcgctggcaatgatctgctgatcggcggcggcggcgatgacatcctgcgcggtggcgctggcagcgacacgtatcactttgatctgggctggggcaacgacaagatcgtcgccagcgacaccggcacgggccgggtggaaaccatccggtttggcgaaggcatccttgccagcgacatccgcctgggccgcaccacctacgacctggtgctgacccacagcaatggcgatcgcatcaccgtcgacatgggcctgtacaacgacgcggctgccggcagtgcgtaccggatcgaccaggtgagcttcgccgacggcaccctgtggacgatggaccagatcaagcagatgctgctgcgtccgaccagcggtgcggccagcactaccggctttgccagcaatggtctgatccagggcgacgaaggtaacgacaatgcgctggcgggccacgataccctgtacggtgacgcgatctacagcgccgatcgcacagccggccgcttcgccgtcatcgagttcggtgagggcattggggctgtcagcccgggaagctatcgcatcgatcacagcaacgaggtggcgctgttgatctcggcattggcggacggtggtggggccacggactccgctgcggcgataccggcgcgggccgatgacctgcgccacccactggtggcgatgccgagcgcgttgatgctcggctga

SEQ ID NO: 536798 - DNA, 324 bp, Stenotrophomonas maltophilia
atgaggcgcattcccccgcatcgccgtaccgcactcggcactcgctgttggcgcagcattgccatcgccatcctcactctgtggccgttcgctgcgcccaccctcgcctcgcccgtgctggagagcgcctgttccctcgccgcccgccggggcgagcgcatcatcgacgttcccttcgacgtcgtcgacgggcgcatctatgtggaggtgcaggtcaacggcagcggcccgtaccgcttcgccattggcggtcgcgacggccgtgggcctgttcggtgtccactccggcgcggcgctggctacggtggtgggagtgctgattga

SEQ ID NO: 536799 - DNA, 489 bp, Stenotrophomonas maltophilia
atgaatgtcatgagcgagacatttgaaagctccatgcaggaaatactggaatccatgctcggcgtttgcctggagtacgtagagaatcgcgtggatggggtctacctttacggcgctgcggaggatgggacttcctcagcaaacgtcttctatgaaataggcggtggaatctacaggattcaccagttgaacgactctccagccgcccagggagggcagcaattcgacctgtcgcgagaccgtagcttcgctttgctggatttagtcctggacgactttgaccgcctgcttgagcttcatgaaggtcatgagcgggagccccctacccaactgaaggcgcacttcaacgccgttaccggaaagctgagcatcaagttcagccatgaccttcatttctccaataccgaagatctcctacccagccacttcttcgaggcatggctccaagaggtgaaggaaggctttccgaacagccgtagcgctggttag

SEQ ID NO: 536800 - DNA, 1479 bp, Stenotrophomonas maltophilia
atgaaaggaatgcgtctggctgtagtggcggttgccagtggcttgatctttgcaccgcatgcgtggggttctgaagtccagcgtacgtctatcgccgaagattcgagcgtctatgccgaagctgtcgcgatgcttgagcgggaggccgcgggccagttgatgcgtcacctgcaggaaaagggcacgttgaggcaggtgagcgtgaacatccgacttgaaatggacaagcgatcaatgactgtcaacttcggccccggataccttccaggtccggagggtagctacgatgagctcttcctccacccgatggcatcgtcgctgaggtttttcgcggaaaagtctgggttggaggtaaatgacatcaacttcctttttgagggaaagccccttgaggactattacccggacgacctggcagtgccggtgcaaagcaggcctagggcaacgcccagttcggctttggtctcgtcaagtcatggttacatcagcctgcatcccagccgggagtggaagttccagcgaccagcgccgctagggctgcaggaggacacgctcagtccaatctatggcgacgaactgcaggcgctgattgaacagcggagtggcctggccgttcatcgggcacggagtcgatcaactgatcttcaccctgaatcgaacatgccctgggaacatatgtcgtcccgttatcatctcaaggctctgtttccagagcgcgccgatatgtggaatgagtttccaaacaccactgattccgcgcgcgagaaggatgaggacatacgggctcgtccgaactacgccaatcatctgggcgtggatgtcatgatcagcttgcattccaatggccacgattccgctggtgttcgcggcactgaggtgtattaccaccgtgaaaagccacaggacaaacccttggccgacagtgttatctgttcaatgcgggagctcatccgtgcgcagcccggctatgaggcattcccgattcgcgagagttcaaatcaaggagctcacggcgaaaaccgcatcggaaagatgccgtctgtcatcgtcgaaactgcctatcactcgaatcctgaggatgctgcagcactgcaggatcccgtgttccgctcggcgtcgatgaagggcgtggagaagggctatcgcctatgggccactggcaaagtgtgcgagcccctggcactccagccccttccggatatcgaggttccgctccagtcttcgcgcgatgtgtccgtgagcttcgtgggaaacccccagtatccgttggcacttgaggtgtcggtggctgattgcgatcggccgggattctgtaccccttgggtggggcggtttgagacgccagacgagccattgaaattcggggcgagctgctcgtcttccatgccaggtaccgttcgctggaaggttgcgctgaaggatgcagatggtgtggcggctgcccccatggagttcacgcaggcatgtgttcaggcctga

SEQ ID NO: 536801 - DNA, 630 bp, Stenotrophomonas maltophilia
atgatccgaacgttcaccccgctgtcgtgtgcgctggccgccgccgtcgccctctccgcactcaccgctgcagccccggcctctgcattgcaggcgggccttacgccacagaactgcgaggctggcggcaacatcggcctttggcgtatcagtcagggttatcgcttcaagggtgtcggccaaccgatgaccgactggcagaagcccgccaatagtctgaatgcctttgcctactgcaagccgatggtcgtggccctgcgtggcgatctcctggcccaggagcatccggtgggtcagatagacggctacaccaccttcagcacctctcatcctgctgttggcgtgcagtaccgcatccacgaccgcttcggcgcggctcaggacatcaagggcaatggcgagtcgttcctgatcgcgatcgagtccagccagtacaagtactacagccaccaggagacgtatccgaacgtcatccagatgagcgtcgagtaccgctacatcgcactggccgaccatctgccggcggtggtggcgctggaagatcagccgctgtttgtgtactcgaccgatggcggtccggcgggcgagggtgtgctcaccgcaaaggtggagtacctggcggccgagtaa

SEQ ID NO: 536802 - DNA, 909 bp, Stenotrophomonas maltophilia
atgatctggcgaacatcctgcgtcattgtattctgctctttcatgggcgcctgtgccctgcagccaaagagcacgccaccgcaggtctcatccgcaggttacacatcggtcagctcgacccttctggcaggctggatctacctgcgcagtgagagctatctacctggatcgaatctggcgtccggcacccctgagatcaaggtatgcgagtctgtcgcacacagcatccaacttgagatctacccgggcgtcgagccagatgttgaaagaacctgccggaacatagactcctccgccaccgaagcggagcgatggttccccaggcgcggtacccgctattcggtcatcatcgtgcctgaagggcaatccatttccgtgagcaggtggagtttcggatatcgatcggcgcaccttgcgttggcggtggcggcattcggtaaccaagaaagacgagagggaaatcttgttgatctagtggcgcatgagacctttcatatactcggtcgaattgccggggatgcccgcgggcaggatgagtaccaggcctactacgcgggcttgtgcgctcagctcgcggttcttggatcgattcccgaatccgccttgccaggagccccgcttcaagggggcgtggatgaaccaacgcgggcatcttcagattcggcgtatcgggtgaggcgtgaagccttgctgctgtcccgcgatggatcgatcaaggcgggcgacgatggcggcagagcacttgctctgcgctgcaccgcgttgcaaaaggtgacagcgcggccggcgaaggcggatgttcggcctgatctcgattgggtcccgaacggagcgacgcagaccatccactggttgacgccgatcctgccccgggcatcaactccgtttacaacagcatggcttctttga

SEQ ID NO: 536803 - DNA, 2067 bp, Stenotrophomonas maltophilia
atgaacaacgcatccaccgccaggccggcggcactggtggtcgccagcctggccgccgcactccagctcaacgctccggcaatggcgcaggacgccggcgctcccgccagccctgcccagggcgaccggcgatccgacaccgccacgctggacaaggtgatggtcattggcagcaacatccgcgacgccattggcggcggtgcctccccggtcatcgtgatcgaccgggaggccattgatcgaagcggggtgccctcgttgcagcagctcttcgagaagctgccgcagaacttcggtggcggcgccaacggcgccaatgtcggcaacctcggcgtcgaccgcgacaccggcaacaacttcggccagggcactgccatcaacctgcgcggcctcggaacgggcaccacgctgacgctgatcaacggccaccgtgtgacctcctcgaaccgctatcagtacgtcgacatctcgctgattccgctgagtgccatcgagcgcgtggagatccttaccgatggtgcctctgccatctacggcaccgacgccgtcggcggtgtggtcaacatcgttctgcgccgggatttcaccggctatgagacctcgctccgctatggcagcgtcacccgcggcaacatggacgagtaccaggcatcacagtccgccggctggtcctgggaggggggccatatgatggccagctacgagttcctgaagcaggccaacctcgctgcggtcgacaaggacttttcccggaacgttaccgtcaggccgtacgacatctatcccggatcgaagcggcacagcctgtacctggatggcgagcaggaactcagcgatgtgctgacgctcaacctgaccggctcctttgccaggcgcgagatggacaccaccatttccggaaccgccgacgaaacccgcctgttcccgcatacgcggcagttcgatgtgttcgccggccttaccctcgagcttccgcgccagtggcaggcacgcctgaattccggattcggcaggagcgatgtctcctacgagagaaccaccatctcgggcagttcggtcagcaccgcaccgccgacggatacgaattccgaatcgcgctatctggaagtgattgccgacggcgagctgttcaatctcccggccggcggcgtgcgcgcggcattcggtgcgggctaccaccgagaaggctatgaactgctcgaccaccgcggccttgagaagccgctggatctgcagcgcacgatccgctccgcctttgctgagctcaatgttccgctgctcgcagacacgcctggcgttcgtcgcctgtcactgactgcggccgcacgctacgacgactacagcgatttcggatccaccctcaatcccaagctgggcctgctgtgggaggcgatggaaggactttcattccgcaccagctacggccgctcctatcgtgcgccggtctaccaggacatgcagctgaacaacaccgtggtggtggccaaggtacccaacccgagcgcggccagcggaagcacggtgctgatgatgctctccaacggcaacccggatctggggcctgaacgtgccaagacctggacgggaggcttttcgttcgcgcccccgtcactgccgggcttcaaggttgacgcgaactactatcacatcgagtatgccgaccggatcggcagcggcttcggtggcagcttcccgtcgctgttcctgcagtccaccgcgccctatgcggacctgctgaccgtcaacccgacgccgcagcagatccagcaggcgcgccagctcggcgcctccggcctgggcctgttcgtatcgcgggcaggcccttatgccctggcgccaggtgccgatgaaaccagcagcgaggtcatcctcgacaaccgcttccgcaacaacgcgttcacttcccaacgcggcgtcgatttcactgcctcctacgacttcgacgccggccagacccgcgttgcgttgaaccttgccggccagtacatcatcgattccaagcgccgcgtgaccgccacctcgcccgaggtcgacgcggtgaacacgtgtacttcccggtcgacctga

SEQ ID NO: 536804 - DNA, 657 bp, Stenotrophomonas maltophilia
atgggaaacgataaacagccaactgctgaagagctggaagcgcatggtcgccgagttatccaaatgagcctggcagtggaggcactttccgagcagattgaagccatctacgggatgttcatggactctctgcgcggatgggggcacgttcgccggtcgatcgaagccgctgtcgtgcagcaggtgcagagcggtgcgacacgggaggcagttcttcgttccgtccttacccatgggaaaggaaatccacagacaggaaccgctctccatagttcaactgtaaaggagcgcttggacgcgtgtgcggagggtgggttcaacgaagctattctgagcaacctttgtcttgtagcaatctacgcccattgggaaatgcacgctcgagctggaattgccgacgcactaggcgttcgcacagatgacgtcaaggcccccatattcggcgatcttcgtcaaatgcggcactgcattcttcatggcggcggcataatggacgagcgcgctcgccacctgcaatcattgaagtggttcaagaagggagatcgcattgtccttactcaagagcgatttcacgagctgatcgagaagctcagggattttccggatcctattcatacgccgacgtacaggccatttcctagtttggacaaaggttag

SEQ ID NO: 536805 - DNA, 2094 bp, Stenotrophomonas maltophilia
atggccggcaagcgtcagcattacattccccgatttctccagcgcggctttctcgcatctggcaatgccacgggcagtggagagaggacgtggctgcacttgcgcggggataccccgcggctaacagggatccgcgacgtcggtgttgagacccacttctattcccggccaagccttgatggcagccggaccctcgacgatctaatcacggacatcgaatcagtgttcttgggtgatttgcgctacgcctgcgaagctgcgatcgaacaaccgctcgatagcgaccgggccgcgcgtctagtcactcacttgatgcttcgcacggcattcgtacgctccacgttcaaccaggcggcactgggcgttgtcgatgagatcgtcgccttggtcggcacgcgggaaagcgcacgagctggatttcggatcgatgatccgacactcgatctggcatcgtctccattggtaactgctgctgtggaggctgcaaccgaggcgggcgtggatatgccactgccgctcaagcagcgggtaatggggtatgtcgtccgggagcacttcgatgacatattcagcggcatggacgcgaccatggccgtgtttcgaaagctcatgaccgagcgcatggccaaaacgagcgcggaggctcacaacaaggttttggcccttgaaaagcaaacagcttgggaggtgggtcttggtgggctggtgtggcagatccagtcggttcggcaggtcatcttgcccgattgcatcgccgtggcccaaatcgatggcggtgacctttccccactggtgatggcaggtctcgacggattggaggtgtgcatcgtacccattcgcgccgatcgcgtaatggtagggcgtcgcgtcggcgcagccctgccatgccttgatgccctcaatcgttctctggcggcatgtgcagaccgtttcttcatcgccacaacgccgatgggcgttttcgggctttccgaacgcattggccagcgtgcagccgaagtgatgggctctacagtggccgacgcgattgcccaccttcgcccggcgacctcgggtcaaccttcagctgacgcgcaagcgcgaatcgcacaggccaagcgcgcatcggctgcgttctcgtactccctgaccattcctccgttggagagccaagtgcaggtcgaggtcgtgcagacattggtgcaagcggcagtttatgagcaatcgctccatatgcccttggaggcgctcgatggcattacctttgcacttgattacgccagcacggtggctcgctttgaccgcggcgatgatgccctccccccggaccccagccaagaacgcgattacggcacacccgttgctaagtgcctcacggtgacgcgggacggtcagcgcaagctccacctagtgtttgacgcgaaggtcgcgttgatgctcgcgtcccccgataagacagagatgcaaggtggaattcacatcttggcatcacagcttggacatgtggtccacgatgcggcctaccaatggccgttcgaagcgcgcggtgaacactatccggatgcgacaaccgcactgctctaccccgctgctgcaaccctgccaggccagtacttcacagctagggcagcagcgtatgcggcgccttcagccggggcaaggtatgccgagttgttccgagatgcgatggcatcggcccggcagatcatcgacagtgcacggctacgctatcgggtcgatgccaaccttgatgctttcgtcgccatcgctctgcgcgcggcgaatcacgccatggatcacgccgcccagtggctggggcaccgtgaaggcctcggcggagacagcgaggacggtggcctaatggctgaaaccgccgcttcattggggctgtacgaatggctcaccctattgggagatgacctgcgccagctatacgaccctgaggaggatttctcaactgctcgggtttttgcgcttacacggcatgtcgagcgcgtattttggatcttccaaatgttcccttggctcactgaggatggccgcgcgtacgtgactgtgcccatgggcaacgatgcggcgattctggatgcggccgagcaggtcactgacggctga

SEQ ID NO: 536806 - DNA, 471 bp, Stenotrophomonas maltophilia
gtggcgtggtgcagttgggcggccacggccctgtgcgttggggtcgtgattgcggcacaggcccagtggctggagtcacccgtcccctcgcctatcgcgttccagcgtatctccaacgaacgattctcagagttgcgccggcaagcgatgcagttcgtggaggttcggtccgggcacggcttccagttcgtggagcagcatgaacacgcctcttttcaggttcactgcagaggcgtgcccgtgttgtggctggagatgcggcagcagcatgtgctgttgcgggcgtcactggatgcggagcggcgggcgcctgctgttgtacagctgcgggcgcagcttcaatggcagttgcaacccgtggactatctggagcaggtgctggcgggtgtgccggagcctgttctgatggatcgggtgttgctgatgctcgcgggcgaggtgcctgatggggtgcgatgtggcatgccgtag

SEQ ID NO: 536807 - DNA, 1680 bp, Stenotrophomonas maltophilia
atgctgaacatcgtcccagaccccgtcagcggctggaccgtgaaagacacgtgtccgaaagaagccgtgaccatcaatcacatcgtcgttgacagcggcggcgaagccatcccgtcgaatacctacggcatggagatcgaattctgcacgcatgacagcgaggtcttcgcgttcacccatgtggtggcggcccgcttcaagcccggccagatcttccggaagaacaacgagaaagtgaaccttgggcagagcggcgcgtgggtgatcgaatcggattcggacaataccttcgagctggtcagtccgccgctgcgcttcgatacgatcaggtccgcgtacgcattcaaggccaagcttgtccaggcgctgcgcgactcggtcagcgtcaccctgcccccgcagaatgtcgacatgcagctggaagatgtcgcggtcgacgacgcaccccccatcgtcgcctgcctgttcagcgattggcaggagcgcttccggccgcgccttcacaacttgctcagcgaagccgcccagagcggaaagctcgaacttgatctgctgcccgacaacggcccggcgctggtgccgccttcctgggagtacgccagctggggcgacgtaggcgatgagatcaacgtgtacaacgtcgacgacggcatcaacattccggcgggccgctaccggcatagcctgcagcgcgccgattggcccgactacacgcgccagatcatcctggccaagtacagcaagttctggtccagcggcttctcctcgcagatgaacctgcccatgaccctgtccggctactacctgtacatgctgcgcaagacggccatgccgcagtacaccgcactggtgaacggccatgaccctcatccctgcattaccgaacgcgacaaccgcaagctcaatctctggtactggcggcacgtcctgctgcgggcctgctgcctctacatcgtcagggtggacaacctggaccagaacgatgccttcaacccggtaaacctgccgcgatgcgcggtgctctatctggtgtcgagcaagctgctgaccggcgccttggcatcgatcagcgagccgctgcagctggagatgcaacgcgccgcctgggatgccagctccacccaggcgatcgatgccgaccagggggccacgatgaccgaggcccagcgcgactgggcgccttatcacagcggcctgaaggaccttaccggcatctggttgaaggcctcgctgatggatgtgctgcgcacgcaggatctggccgtctatcaatgggcggtgttgaacctgcccaacgtgctgctggatcagtcgatctggcgagatgcgttcaagaactgggatgtgctcaacgctctggagccgctgcgcgaccgtgcagacgtggactggaacgacctcgactacttccggcgccgcggccctcgcgccaggctgtgcgatcgcattcacgccgcttcgcagcagttggccgagtacctgttcgacctgggccatgaccagccagtgatgcccggcgacgtggatctgccaccacagagcgagcgccgattccttgagcgcgacggcgtgcctgcctgggaagcgcgctacgacacgctgtaccggccgatcgtgaccgacgccaaaggcaaacccgtgcagccggcgcgctatctcatcgaacaccgcaacaactga

SEQ ID NO: 536808 - DNA, 957 bp, Stenotrophomonas maltophilia
atgccccagtccgtctatgccgccgtgagatccggaactcaatggctgatcgcccagaagcgcaccaccaacaactggtggagcgcctatgccacgccggttctggtgatggaggctgcagcgctgttgaacgctgcgttgacgtccgagaaccgtgccgcccagaccgacagcgccatcgcgctgctggccaatgccgagactgccgcccgcaccgcctggagtaccgtggtagccaatgccccggccatcgcggcggtcgccaccgcggcggggcaagtccagaccgcccgcgggctcaacaccgtcgaggcactgcaggccgcgattccgtatgtactgaccgccgtcgatcgtgcctcgctggccgccgggttcgccgcccgcgtcgcgctcagcgtacctcccatcgctgcgtggcccgatgcagggctcggcgcacgcatcgcaggggcacaggcagcgctggaaacctggaccgccgagcgcccggcagtgaccgtcaaccaggctggacaatgggcgcttcccggtggcgccaagggcgctgccgaagcggctgaggtggcggcccgccgtgagtttgccgaggaaaccggaatggcccttgatgcaggctatgtcatggagcacacggtcgcgttcagcagtcaacccggtgaggtactgttctacctggtctgctttaccgcgcccgcagaggttgatctggcgaccctggcgaccacgctcaaccagcagttggcgccacggccggcctggatgggccgcccggcctcggattcgatcgtggactgggaactgtcgcgcatgcagcgggtggaacaggccgagatttcctccctgctgggcgtacgccagccggtggatccgccgccgggcggtcccgcgcaccggcagagcatcgactggtatgccgcaatcgcgcgctacatcgagggcctgcccgcagactga

SEQ ID NO: 536809 - DNA, 276 bp, Stenotrophomonas maltophilia
atggctgtctatatggtgggttacgacttgaacaagtcaggtaagaactacgcggaccttattgctaaaatcaaagagatcagcaatggttactggcaccatctcgattcgacttggttgattggtcatgacggtacttcggaggtaatccgagatgcgctgatgcccttcctcgacggagacgacgagctcttggttgccttgctcgcaagcggcgattgggcctccttcggtatcacccaagctggtgcaaattggctgcacgaacatatgtga

SEQ ID NO: 536810 - DNA, 708 bp, Stenotrophomonas maltophilia
atgaaaccacccgtttccacccgatgggtgttctcgatggtgctgctggtgctggccggtgcggcggtggctggcggggcgctgcagaccctcggcgaaacgctgggccattcgatgccgcgcgaccggatgccggcatcggtcactgcgcaggcgccgcgcgagcagccgacatcgcttgcgcccgtgaccgatccgcagccggtcccgattcccgaacacaacaaccgtctgttcgatgccgattacctgcaggatgcgcgtcaggcgctggagcagctgccggcgctggctggacagcggttgacagtgttccacagtgtccacttctacgacgatggccgcatccacctggatctggtcgacccccagcagcccacccacgtcgacagctaccacttcgaacgcggccaatggcgcaagggcaacccggtgaacccacagcagttcgcacccaccatcagcctgcagcgcagcagcacgccgctggccaacatcgatttcgatgccgtaccacgtgtggcgcgtgcactgcaggaacagcgcaacgcacttcagaatcctgcttcagaggtcggccacgtctacgtgatcgtgcgcaaggctggccggctggcctggttgccggacgaagtcgcgggcgatcgcgaatcggtacgcctgcagttcgatgcacagggcgtggcccgcagcgcaagccgccaatag

SEQ ID NO: 536811 - DNA, 957 bp, Stenotrophomonas maltophilia
atgaaggcccatctctggttctggggcgcgttcctgctgttcttcgcgttgcccttcccctgcatcctctatctcggcaccgcttggccactggcattggccgatcgaagtaccccctggcttgcgttgctgctgctcgcgttgtcgctggcgatgtggctggtgctgctgttcgcgttcctgcattacctgctgcttggcccactgcgtgcgctgcatcgcgtgcgttcaatcctcgtcgatggtgaaccgcgcagcgcactgatcgaacaggccggacagactggcgtgcatatgcgcggtttcgcgcaatggaaactgcagctggccttccggaacctgtctggcacaccgatccgcgaacagctgctggtggtcgacagcaagccgcagctgcagcgtttcgttgctggcaggcacatcgatgcacgcctgagccgaacgccgggtgtccatcccaacgtggtactcgacggtgctcagcccgaactggatattgccagcctgtggcggcgtggaatcggcggtgccatcggcatcgccggggtagccggtgcgtatgtagctgcttaccgcctgcagagcgaaggcctcggctggacgttcctgtccttcggccacccgttgctggtgtgcccgctggtgctgtgcagctacatgctgggcctgcgcctgctcggccgcctgctgcaggccgatgcccgcggcgacgcgctgaaatatcgtggcatcggtgtcgaggccagggtgctgaaggtgcgccagaccggcacctatctcaacgaacagccacaggtggaattccagctggagtacaccgaccgcgagggtggcgtgcggcaggccagcgtgcgtcgcttcatcccgctgatcgaactggccagcattccgcgcgatcagatgaccgtgctgtacgacccggatgagcgtggcagcgtgcgcctggaggggatatga

SEQ ID NO: 536812 - DNA, 783 bp, Stenotrophomonas maltophilia
atgacggtgacctgcaacggccagccggcgcaggtcgaagatctgctgccggcactggtcaactacggccatttcacctcgctgcaggtgcgcggcggtgccgtgcaggggctcgatctgcatcttgcgcggctgtcgcaggccacgcgcgaactgtttggcagcgaactggatacggcgcgggtgcaggcgtggatggcgcaggcgctgcagcaggcggcgcgggccgatgcctcgctgcgggtgacggtgtactcgcgccacttcgatttccgcagcccgctggcgaccgtgccggtggacgtgctggtggccgtctccgcgccggtggcactgagcgcacccaagcgggtgcgcagcgtggtctggcagcgcgagctgccgcagatcaagcacgtgggcaccttcggcctgttcgccgagcggcgtgcggcgatggcggaaggattcgacgatgtgctgttcgtgaccgccgatggcgacgtgagtgaaggcagcacctggaacctggccatgcacgatggtgagcggctgctctggccgcaggcccccgccctgcgcgggaccgccgaggcgctgttgctgcggtactggccgggcgcgcaggccacccggccgctgcggctggctgacctggccagcgtgaaggcggcctttgcctgcaatgccagcggcctgtgggcgctggaggccatcgacgggcaggtcctgcccggctcgcaggcgctggctgaacagggcaaggcggtgctggcgggggtggcctgggacgatctgggctga

SEQ ID NO: 536813 - DNA, 2193 bp, Stenotrophomonas maltophilia
atgtccccgaacccgcatgaccgcctgccccgccgcgcgctgctgcccgctgccctgctttcgtcgttggccctgctgtccgcacccagcgcattcgcggccgccgatggcgctgccgacgccaagaccctggaccgggtcagcgtccgcgccgaacagtccgcaccgccgtccagctccacccgcctgccgatcaccctgcaggaaaccccgcagtcggccaccgcgatcagcctgcagcgcctgcaggacgaatcgctgttcagcatcaacgacgtgatgcgcaccgtgcccggcgtcagcgtgtccttctatgacacccagcgtccgctctactacgcgcgtggctttgccatcaccgatttccaggtcgacggcattcccacttacagcggttccaccaaccaggaatacgacaccgccttctacgaccgcatcgaagtcatccgcggcgccaacggcctgctcagcggtgcgggcgtgccgtcggccacggtcaacctgctgcgcaagcgtccgggcaaggagttcgacgcatcgttctcgctcagtgccggcagctgggactaccgccgcatgcaggccgacgtgaccgcgccgctcaccgatgatggccgcttccgcagccgggtagtcgccgcctacaccgatcgcgggctgtactacgaccgctacgacgagaccaagatggcgggcatggcggtgctggaaggcgacgtcaccgacagcaccaccctcaccctgggttaccagagccaggacaacaacccgaccggctcgacctggggcaccgtcgcgttcttcgacaaccagggcaacttcgcccatctcgcgcgctcgaccaacctgtcgccgaagtggagctactggaagcgcgagagcaataccgcctttgccaatctggaacagcgcttcggcgaggactggctgctgaagatcaacaccgcctatacccgtggcaacgtgcagaacgtgcgcctgtacggcaccggctacccggacccgaactccggcgcgggcatctacctgcgcgccgctgcaggcgattccaaggatacgcgccgcaacgtcgatgcctacctgaccggcaccttcccgctgttcggccgcgaccatgacctgaccgtgggtgcacagtggtcggacctggagggcaccaccaataccgtggcgctgaacttcccgggcgactgggcgacgtgcgggcgtgagcgctgctactacatccccaacgtgttcaactgggacggcgacatctccgaagtgacctacagccgcaccggcgcgcgccgcgtggccaagaccacgcagagtggcgtctacctggccacccggctgcgcctggccgatccgctgtcgctgattgccggtgcccgcctgagccgctggcagaccctcagccgctcgtacaacgcggccggggcctataccggcaccagcggcgcctacaaggtgagcgatgaggtcaccccgtacgtgggcctggtctacgagatcaccccgaacgtctccacgtatgccagctacaccgagatcttcaacccgcagaactacaaggaccgcaacgagaacctgctggcgccggtgcagggttcgaacctggaagcgggcatcaagacgcagtggttcgatggccgcctgaccgccaatgcggcggtgttcgaggccaagcaggacaactacgcggtgcgtgacatgagcgtgccggaaggcacgctgagcgatggcagctcggcctacatcggcatcaacggcaccaaggcgcgcggctgggaaatggacgtcaacggcgaaatcctgccgggctggacggtcaacgccggctacacccacgtcaaggtgacccgggccgccaccgacctgctgtatgccaacccgcccgagaacctgctgcagctcaatacccaggtgcagctgcgcggcgcgctggaacgcctgagcatcggcggcggcctgcagtggcagagccgggtacagggctacaacatcgcctacccgctgggtggcacggtgacggtgaaccagccggcgtactcgctggtgcagttcaatgccaactaccgcatcagcgacaactggaccgcgacgttgagcgtgcgcaacgcgctggacaagacctactgggccaacctggactacaacaacttcggcgaaccgcgcttcgtggcggccagcctgcgctggaagttctaa

SEQ ID NO: 536814 - DNA, 675 bp, Stenotrophomonas maltophilia
atgggctgccgggtaccggataccgcgcccccccctgccccacatcggccaggccagccaccgctgcagccttccagccaacatcgtttgaagtgtctcgactccccatgcatcgtgttcacgatccaaatgctgtcgccgagccgacctatgaaaagcacacttcgtatgcgcccgatcaaggggccggtcatggccatcgtgaccttgctctgctcgatgcccctttgtgatcacgcatctgcctggagtcgcgttggcgcgatcgaggtcactgaccacgccggcagaccctgtttcgggcttcccaggaaagagcgcaagcgtatcggtaagactcctcaggtgtttggtgtggaggtgtatgacgcgattactccaccgctgcggcggctatggtctttcgacttttcctatcctgcgtcactcccgcttccacccggcgcttgcgtcctctatggagaagtgccagccaatgccgttgcaatacaaaccgcaatgccgctggagcctggacgcctgtacgacgtcacgatgtcggccaccagaacgggcgccacccggttccatagcgcccgattctgcgtgaaggcggacgccgatggcagcctgcgggcgatccaggtcagctacgacgacgctctgggctggagtcctgcggtctgcctgccctga

SEQ ID NO: 536815 - DNA, 681 bp, Stenotrophomonas maltophilia
atgagtacccccgccaacttcaacggcgcacgcccggtgatcgatccggacaacgccgcgatgctgctgatcgaccaccagagcggcctgttccagaccatcgcggacatgccgttcagcaccgtgcgcgcgcacgccactgcactggcgaagatggccacgctggcccggatgccggtgatcaccaccgcctcggtgccgcagggcccgaatggcccgctgatcccggagatccacgacgcagcgccgcatgcgcagtacgtggcgcgcaagggcgagatcaatgcctgggacaatcccgaattcgttgccgccgtgaaggccactggccgcagacagctgatcatcgccggcaccatcaccagcgtgtgcatggccttcccgtcgatcgccgccgccgccgatggctaccaggtgttcgcggtgatcgatgcctcgggcacctattcgaagatggccgaggagatcaccctggcgcgcgtggtacaggcaggcgtggtgccgatggacaccgccgcggtggcctcggagatccagcgcagctggaaccgcgacgatgcgcagcagtgggccgaggtctacacgaagatcttcccgaactaccagctgctgatcgagagctacctgaaggcgcaggacgtgcagaagaaccacgagccgctggattcgcagcgcagctga

SEQ ID NO: 536816 - DNA, 1062 bp, Stenotrophomonas maltophilia
gtgatcaagaaattagaaagaagcccaaccaatatgtcgattgccagctttcacgagcagaatcaggcgtcgaagtttaactatgaaccaccttatcagaggaagtcagtatgggctgacgagaagcagagctatttcattgacagcatcctgaggaacttcccaattccaccaatttttcttcatagaaagattgacgagagcaccggaaggacgtctttcgatgtgatcgacggaaagcagcgactcactgccattgcaagatttattaataacgaaatacctgcttccaatgagtatgggacaggcgacggagaggcggacgggggtgccgagattgatggcaagtacttccaagatctaagcaatcagagcgcctccgatctcaaagcatccttctggaaatatgacctccctattgaatatattgacccatccgatacggggttgattgaagaggtttttgatcgactcaatcgaaatggcgaacctctcaatgggcaagaactgcgtaacgctcagtaccactcctcaaaaatagttatcgccgttgatgagctgcgcgcgcacccctacatgatagagaggctccggtttacagatttggcgcgaatggaggatagagaattctgctccgagtgcctactttcgtgccagcaaaggcaagtaataggatccaatcaacgaattcttgacgagctctacaaaaagtataacgacgaggatttcgacgcatcccttacagcctcaattagtatttgcgaggagctgcaatcacttgatctccaatatgacgaatggcgaattgacggcgtatcacacctgtacgggctctggggactagcacttaccctgaagaccaacggaaaatcgatctcaaactacaccagtcaattgacgtccttctaccagtctcttcgggataagaatgcaccttccgaccctcatagagaggagtataagaagagcatgaactcaagaactaaagagcgcttcatgcgggtgaagcgtgtacgagctctgctcgcagcctgcggcgaaggagtgctttctgtctcataa

SEQ ID NO: 536817 - DNA, 1005 bp, Stenotrophomonas maltophilia
ttgaaagttcttgtaatcgcgggaaacggactatccatatccctaatggggaaatcatcccctgaagttgatcttttcaaccttttcgccagaggtggcgacgttagttggcccgcctcaaatgccccaggattcttaagctatgaattctgccccaatctttgggctctcggcgcgcgacacacgatggcgcctcaaaaatcgtacgaactgatagagcagatcataaccgccgtaaatgcgtgctgccttgcggacccatcatccctagatgacggcatatacattcgcgcatacaaagagctcgtctcttaccttagatacctctttgttcactacgacaattttctaataaatagaaacttcttcaacaaagaagagaatcagacaccactaacgtggctgtttgatgcatccctaaacaaatcaattgaatcaattaacgtcgtcacctttaactatgacgcattccttgaaagatttcttgacgcaagaaagattgactatcgcatcccactgctaacgggatcaaacgccaaactcgcaattcataagccccacggatcaatcaccttctgcggaaaaaaacccctcgatcaatcttcctttgcagtaaactacaacaactcctttaccgaaggtggcctggatgatcttatcgtacgctatgaagagcttgatagtcattattccagcaccggaattcttcctcccgcaggagattccgaccgctataaacaccgttggattcgacagatctgggacgaggcattagagggggcggcatcaattggcgatggagatattgttataatatacggattgagctattggcacgtcgaccggcgagagatagacgcgctgttgaccaaagtctcccgaaaggctcgcgtcatctccattaatccaactccaaatcacaactttgaagccgtctgctgcagcttgttcaagtcgtaccattcctacagcgcacccaaccagctcgcgaggctgctgaagtga

SEQ ID NO: 536818 - DNA, 666 bp, Stenotrophomonas maltophilia
atgcagcagaccaagacagggaaccgtccatttgatctcaccctcggcagcggcgcacgcgagctgctgaagtggctcgcgctgctggccatgacgggcgaccatgtggccaaggtggtctacgcgggctacctgccagtgatcagtgaactggggcgcatcgcgtttcccctgttcgcgctggtgatggcgtgcaatctggcccagccgggcgccgatctgcccaggtcgatccgccgcctggccctgtgggggctgatcgcccagccgctgcatgcctgggcctttggtttctggctgccgctcaacattctgctcaccttcgcgctggctgcggtggcggtgcacgcgctggccagcaatcgcccgctgttgctgctgctggcggccggcgtgctgccgatgctggtggactaccaatgggccggcgtcggcttcgtgctgctggggtggctggcgttccgccatcgtgcgtggtggctgctgctggtcggcctcgcagcggtgtgctgggccaaccacgatggctgggcgctgctggccattccggtggtgctgttgcttgcccgcgtgcaatggaaggtgccgcgctggcgctgggccttttacgggtattacgtggggcatctggcgctactggccggatacgcgtggcttcacgcctga

SEQ ID NO: 536819 - DNA, 510 bp, Stenotrophomonas maltophilia
atgaaatttccgcacctgattttcgctgcattggtgttcagcgccgcgccgctggtccatgcggatacggccaccatcaccgttagaggaaacgtactgcccggcacctgcaccatcgcaccaacccttgatgtaacgctggacgacatcgatgctaccgacctgaaggcagggcaagacaatgggctgaagccagccacgctcaacttcaccggttgcgtgggcgtgggcagcatcgttctgaccttcagtggcaccgaggatgctgcacaggatggacactggaagaacggcgcatccactggcgctgcaaccggcgtggccgtggcgctgctggacggccccaccggcccgaccgccatcaagaatggcgacacgcgcaacgtgacggtcaacggtgcagccacggccaagctggagatgggcgcgggctactaccgcaaggccggcacgccgctggttgccggtgcagtcagcacccagatcaccgttaccgccgattacaagtaa

SEQ ID NO: 536820 - DNA, 1020 bp, Stenotrophomonas maltophilia
atgcgcatccatctctcatcgtcgccagcacgcccgatgcgctccgctgcccgtggcgtgctgctgcttgcgcttgcgcttgcgggggcgatgagcgccatgacggcagcggcgtgcacgctctcctacccgggtggcaatgccgatctggtcatcgatacctgggatgacgtcgaggccgacaagctcatcagcagctggaacagcgcgggcaatgccaatttcctgggcggctgctccttttcgacctcaacaccggtagacgtcacccctgccatgccgaacctgcagttcgtgcgcaatgtaaccgtggacggacagatctaccccgccttcgcggtggtggggcagccacgctcccccctgctgatcttccgctatatggtgggcaacggcggttccggcttcagcctctctccattcgatgtaagccgaacgctgaactccaccggcgacggtgtgacaggttccttccgctggtcagtggtgtcggtggccgccgtctctcgcggcggtcagatggatgacctacccaccacggccatgggcagtgtcacccacgtatatccgcttgacccgacactgacgaaagtcgagaccttcagcgtcaccgccaagctgcgcagcaagacctgcacgctgatcgacgcgcccgtgaagctggatgacgtctacgcaggcgatctgcccgccgctgacagcaccgcgggcgaaaagacgttcaacgtatcgatgacgtgcaacggggccttcccggtcagcctggtgctgaccgacgccaacgcgccgggcaacaccggcagccggttgacgcccacgcgcaacgcaaccgccgatggcgtgagcgtgcagctgctgcgcgatggcatacctgtcgtgctgggcgacagctggccactgcctaccagccagaacggcccgcaagagattccgttggccgcgcggtactaccgagaggccggcactttcggctcgggcgttgtggaagggcaggcggtcattaccgctacgtaccgatag

SEQ ID NO: 536821 - DNA, 1017 bp, Stenotrophomonas maltophilia
atggcaacccctacactccagtttgagctgaagcgccacactctgcgcagccgctgcgtgtgggcggcactgggcctgctggcctcggccacggcagctgcctgcaccggccagcacaacgccggcgcggccatcaacctcaacatcactggctgggccaatgcccccaagcacacgcgcataggcaattggaccaacatgggtgccaaccagttcctgaccggctgcacaccgggcgaggtggtaccccgcgatctcgctgccctgctgccagagctggtctatgtggaaaacatcaccgttgagggcctcagctacccggccttcgggatacggggctacccgcgttcccccttgttgattttcaggtacgtcgactgggatggtgatcccatcaccccagaccactatgggccgttggacgtgcgcgtgcccatgcacgttccttcgcaggcgcacgcgaccaaccagcgtggctcgatcgtgcggatggccgccatggcacggggtgggctgatggaatcgattccgtccactgtgctggggccggtcacgcacatctcgccgctctatcccgcttttgtgaagaccgataccttcagcttttccgccacgttggacatgccgacctgcacgttcaccgacaaggcagtctccctgcagggcatccgcgctgccgatctgcccgccgcgggcagcgacgccggattggaggctttcgaggtggcgatggactgcaacggcaacttcgccctggatctcaccctgaccgacgcgcatgcgcccggcaatacaggcagcctgctgagtccaaccagcaatgccacagccgaaggtgtgcgcgtgcaattgctgcgcgagggcagcccggttgaactgggcaacgcttggcccatcgcgcgcacccaggtgggaccgcagatgattccactggccgcacgctaccaccgcattgcgggcgactttggcgcaggggaggtggaagggcaggctatcctcacggccacctaccgctga

SEQ ID NO: 536822 - DNA, 972 bp, Stenotrophomonas maltophilia
atgatccgttcgtcagtgccaaaccgccatcgcctctgccttgatcttgctgcaaccatagcgctgtgcgctgtcacgggcggcgcatgggcgtgcaccgcgaccgtcaacagcagccatgcgccgcatttccagcaggatgtcggcttccccggcactgcgctgctctcggcggtaggacctgagttcaaactcaccgggtgcaacaccagcgaccttcacgaactgaccatccgtctggaaggtcagagcctgaccccggtatcaacggtcgtctacgacggcgccacctacgtgacctaccagaccagcgctacatcgccgttgtacttcttccatgttcgttcgccgaactcgggtggctttcagtttgccctgaaggatggcgagccgcaggcgctgcacatccagaccagtggtggcggccagctgtacgcgcgaccctacatcggcgtggtcgcacgcgccggcatgaccaatgcgccttccacgccactggggaagtacgtgcttgagcacccactgcttggcatgcgcgccgaatcagcactgtcagcatcggtgacgatgcgggtggagtcctgtgccctgaacgatgcgccggtgtcgctgccggatgtcgaggctgccgatctggtagcggctgacagccatgcacacgagacaggtttcaacgtgcgcatgacctgcagttcggcaggcattccgttgagtttcactctcaccgatgcgaatcaggccagtaacacgggcacccggctggtgcccgcagcaggcagcaccgccaagggtgtcagcatcgaactgttgcgcgttggcacgcctgtggagctgcgtaagacgtggagccatggcgcgtcgtccgcgggagcgcaggacgttccgctgcaggcacgttacgcccgcagtagcggtgccctgcagccgggcagtatcagcgggcaggcgattctgacgctggattaccgctga

SEQ ID NO: 536823 - DNA, 636 bp, Stenotrophomonas maltophilia
atgcgtatgtcagttgcctccctcgccctcgtgccctgcctgctgctggccggccacgccagtgcgcaatccgccgaccgctccggtctctacggcttcgccggtgccagcaagagtgatgtattcacgcctggcacgaaccagcagggccagaagagcgaccgcaagtggagcgatggcaagctgggctatacggtgggcgtgggctaccgcatcaccccgaacctggcactggaagcggcctaccaccggcaggcatccgaatcgcgctccagcagccgtagcaagaacactgatacgtctatcgctggcggctacaccggcagccatgcgtcggcatcggcgctgggcatcctgccgatcggcgatcgattcgagctattcagtcgtctcggtgtggcatcgatgcagacgtcgttcaatgcggaccgcgacagcgcactggataaccgtagttcgcggcagtgggccatgcagtacggctttggcgccacgatgaatcttggccagaacagcttcctgcgcactgaatggagtgcgctggtgccccgcggcaagagtggggccgcacaggcggtcgggcgtgaccgcattcgccattcgcagatcggcgtcgccttcggccaccgcttctaa

SEQ ID NO: 536824 - DNA, 798 bp, Stenotrophomonas maltophilia
atgcgtggatccctgctgcttgccgctgcaatcgccgttgccatggccctgagcgcgcctgtggaggcggccgaacaggcggcggtcaatccgttgctggtcaagcctgttgaacagctgcgcccggacgaggtgcgcttcatgcagcagcaactggccgactggccgcagctgcagcgctatcgcgacaccaacgcacagctgcctgcggcagtgcccggtcaaccacgcgtggtgttcttcggtgattcgattaccgaaggttggggcagggaaggcagtgcctcgttcttcccgggcaagggttggctcaaccgtggcatcagtggccagaccacggcgcagatgctgctgcgtttcccgcaggacgtgctggcgctgcatccgcaggtggtggtgattctggccggcaccaacgacatcgccggcaataccggcccatccacgcaggggatgatcgaagacaacctgcacgcgatggtggatctggcgcgcgcgcatggcattcgcgtggtgttggcctcggtgctgccggtcagcgagtacccatggatgccgggcatcacgcctgcgcccaaggtgcgtgcgttgaacgcttccctgaggcgctatgccgatgcgaagcagctggtgtatctggactactacacgccgatggccaatgccgcaggtggtctggactcacggctggccgaggacggcgtgcatccgaccgcgaagggctatgaagtgatgtcgccgttggctgaggcggcgattggcgttgcactgaatgatgggaaattcagaaatccatag

SEQ ID NO: 536825 - DNA, 354 bp, Stenotrophomonas maltophilia
atgtcagcagaagtcagcgcgacccaatacgctcagttggctgagtttgtcagtgatctgtcaaatcgagacacagatacgctgatgatcaggttcaatctgtccgccccagtgatcagtgagatattcgaggcgttgctggtgtatttctcgccgaacgcaaaattgtcagcgccaccgctaacgagccagtacgaagagtttcctctaatcgttgcgtacgaaagcacagcgggtgacatttcagcggagttgtgtgtgcttgaaaacgacgagcccagcgaggccatcttatatgttgtctttcttgacgcagcgccaaacgagctgtgctacgaatttataaagtcatag

SEQ ID NO: 536826 - DNA, 525 bp, Stenotrophomonas maltophilia
atggatgtcgctgcacgcaggaacaggacgttgtttcgttggatgatgatgctgctgctggccgtgctgatgccgtttgcagcactggcacagtcggcgcccgctgcggcggggcaggccgaaggcgctgaagtagccattgcagcggaagaggcgggctgccgcgcctgcgcctatgagcgcattggaccgaaggtcgatgtcggcctggtggcactgatctcgctgctgctggtgggcctgctggtggcgatatcccgcgaatggggcaccccctcgcagcgctggacctgccgcacgctggccctgatggtggtgggtgtcggcgtggccttgctgtggtgggtgggcagcattgtctacctgggttacaacccgtggcaggaaggtgccgtcgctgatggctcgctcacttccactctgctgaacacctcaccgaagtggctggcggcgctggtgttgatcggcttcgcgccgtccatctggaaacgcagcgagcgcatgcccgcctggcgcatcagctga

SEQ ID NO: 536827 - DNA, 501 bp, Stenotrophomonas maltophilia
atgcgccgggtggatccggccggcgctcccgtttcagccagccaggtccgtacgtgggccgacaccctgatgacggcgctctacaccgcgcagccggtgcgctgggagtaccggcgcaaggacgacttcgcgccaggctgttgggtccatgccaacgcaggtcacgtgtacgccgcccaccagcgtggactcattgtccgcgctctgttcgaaacaccgcgcgtaatccaaccggagaagctgcacgagttccgggggcgcgtgtgcgtccgctgcggcgacagcgaggattgggctgggccggattgtcagcctctgatcaagaaagtcgacccgcgcaccttgctccccttcgatcccagctggctcatccagccactgcagtggctcatcgatgcgccggccaacctcaacacctacgaccgccgccaccgcgcggcgcaagccgccttcctgctggaaaagctcgaagcccacatccaggagtgcaacaagccatga

SEQ ID NO: 536828 - DNA, 564 bp, Stenotrophomonas maltophilia
atgctgagcgcaatgcgcaaatggctgcggcccgaagcggactacggcgagagccagggcatctatctggacgccgtcgagcccgcagacggggaggcactggccgcgtacgcggaattgcggcgcatctgccctgggccatcggcgcgaggcgccagcgaggaaggagcctttgccgaacggctcgcccggatcgcatccggtttcatcatggaaggtaagctcgaacccggccgctatgtgctgaccggggtcacgagcggctcccccggcgacgaagtggttatggtgtcatcggaacatctcgcgttgctgcgaagcatgaacacccgcacgcagggccgagcagtggtgctgatggacagcaagcgaccctatggggatatgtcgtacttctacatcgacctggcccgcgcgcttggggaaccggttccactggacgcgagcggaagagcatcgttcgcaccggaggtgatcgccaggtatgacgaactgcatggccagatgcttggcgtggcccgcgtgttctggcgctctgcagagccggcgcagtccgaatcctga

SEQ ID NO: 536829 - DNA, 792 bp, Stenotrophomonas maltophilia
atgcggctcacgccccctcaaccggccccaccccgccttcgacagatttccgcgagctgccggaacgacgtattgccctggtgggtgtcgaccctggtcgacacagtagagccacgccatgcgtggatcattcattcgatatatgacagaaagatcgtgtcgaccaaggtcgacacctaccaacagccaccggacccaccccgccttcgacagtttcccgcgatctgccggaacggcgttccgctctggtgggtgtcgaccttggtcgacacagtagagccaccccatgcgtggatcattcattcgatatatgacagaaagatcgtgtcgaccaaggtcgacacctaccaacagccaccggacccaccccgccttcgacagtttcccgcgatctgccggaacggcgttccgctctggtgggtgtcgaccttggtcgacacagtagagccaccccatgcgtggatcattcattcgatatatgacagaaagatcgtgtcgaccaaggtcgacacctaccaacagccaccggacccaccccgccttcgacagtttcccgcgatctgccggaacggcgttccgctctggtgggtgtcgaccttggtcgacacagtagagccaccccatgcgtggatgattcattcgatatctgacaggaaaatcgtgtcgaccaaggtcgacacctaccaacagccgcgcgttccaatggccgccgttgccaacagccgcgtgaacctgtcgaaggtggggcggtgtcggagtgcggggtgtccgcggcatggatgccgcggctaa

SEQ ID NO: 536830 - DNA, 1068 bp, Stenotrophomonas maltophilia
atgcgattctgcctgcccgccgccctgctggcactggcctgtccggggggcgtcgcggctgcagccgcggccggtagcctgtatttccagcaccacgactgggttgtggcctgtgacaacaccctgacctgccgagccgcgggttacgcggccgacgaggacagtacgctgagcgtcctgctcacccgcaggggcggccccgggcaggccatcgaggcacgcctgtcgctgcagccggatgagggccaggcacagcccgagggcgcactccgcctgcacatccggcagcgggatctcggcgcgctcgctcccgtcaagggtgaaggcacccacagcttgaatgccgcgcagaccagcgcactgttgtcggctctggtacgtgacggcggaatcagcgtgaccgatgccgccggccaccgttggcccctatcggacagcggtgcggcagcagtgctgctgaagatcgacgaatatcagggccgcctcggcacgcccggcgccatgatgcgcacgggcagcaggccggaatccagcgtacccgccgcaatgcctgtaccgctggtgtacagggccgctaccgtggactcgccccctgacgacgcggcgtttgcacggctggccgccgcacccgccctgcgcgcggcactgcgtgcgacgctgaaggacaacagctgcgaaggactgctggaggccgacgccgatgctccgctcagcaactccccgctgcagatccggcgcctggacgcgcagcacgtactggtcaacgtgccctgctggcgcgcggcctacaacaccggcgacggctactgggtggcccgaccgcaggcacctttccacccgcagtgggtgaccagtgatgcgattgattacgccgacggccagatcatcgcggcgcagaagggtcgcggcctgggtgactgcatttcgcagaacacctggacctggaatggcaccgccttcgtcgccacctcggaaattgcagcaggcctgtgccgcggcgtacccggcggcacctggaacctgccgacgcgggtgaccgaattggaaaaaggggacggagggaattaa

SEQ ID NO: 536831 - DNA, 357 bp, Stenotrophomonas maltophilia
atgagcacgtggccaaccgcagcaattctgcgcttcatcgggttgagcgaggactttgacccctcggttgaacggacagagatggagagaggcgttccccgccagcgggtgatcaacagtggggtaatggcaacggtcacagcgacggtgctgttcaaaactcctgaagacgtggctgtcttcgaggcctggtacttcaacgacatcaagcggatcggctggttcaacgtggtacatccgcgcaccgggcaggttgtggtcgcgcggttcgttggtggaaagcttggtgcaatgtcgccgcaggcaccgcgcttccatcttgcgcagcgagaggtggttatggagtacctgagatga

SEQ ID NO: 536832 - DNA, 393 bp, Stenotrophomonas maltophilia
atgaccgaactgaccaacatcgtggcggaagcgcgccgcctggaaatcctgcaccccgccacggaggagccggtgggcttggtgctgatcctcctgcccgacagccatccgcaggtgaaggcggctgcccgcaaggcgatcaacgatcgcatcaacaatcgcggcaaggtgaccgcagagcagatcgaagccagtcgcatcaccatgctgactgcctcggtgagtggctgggactggcagggcgagctgaccttccacggcgagaagccggcgttccaggaccagaccctgcggcagctactgaaggaattgccctgggtggcagagcaggccgacgccgcgctgggtgaacgtgccgagttctttcgccgacctgacgaaacggacggctga

SEQ ID NO: 536833 - DNA, 471 bp, Stenotrophomonas maltophilia
atggccgctgaagcacagaccaacgcaggttccaagctctacatctgcgccgcacccaagaacaccgacctgaccgagaccgagttcaaggccttgaccttcgtcgaggtgaagaaggtcggcagcgtcggtgagcgcggcatcaataccaacatcgtccagtacgacacctgggacacccaggttgctctgaagggcaagggcatcaccaacgccggtgatccgcaggtggaggtggccgaggacttggccgatcccggtcagatcgcgatgcgcgccgccggtgcaccgaacgtcccggatgcctacgccttcaaggtcgaacgcccggatggctcactggagttcctgcgcggcctggtggccggtcccaacagcccgggcggccgcaatgaggacttcgtgttgaacacctacacgctggccctcaaccaggcgcccatccgcgtggctgcccccgtcaccccgtaa

SEQ ID NO: 536834 - DNA, 489 bp, Stenotrophomonas maltophilia
atggacgatttgcttgaagaacttaatgctatttgcatcaccggcgtgttgagtgaggatgagcgcgttctccaagagatatggaaggaaatcaaagacctgatcgactcctatgagggcgcggtcatgccgccctctgtagtaagggcgatcagaagggcaattgtcctgctggcgaaggcactggcggccgcacaagtcaaggcggctctcaagcgccagctcgacgacttggttgccgagatcgatgctcttgagaagaagaaggctgagcaagaactctcggaacaggaagataagcggctcaaggatctgaaaaaggatgaagccgagatgaggcggaggtacgacgaggcatctgcgcaactcgatgaagacattagcaatgtgacaaacgctattgtccccatccgtagaggacctcgattgccacctcagcatcagcctgcacgtggacgacgtggtgggcttggtggggggccgggatga

SEQ ID NO: 536835 - DNA, 357 bp, Stenotrophomonas maltophilia
atgaaccgcttctatgaccgcatgcaggccaccgcagggcggctgatcgctcgcttcggctatgccacgcagctggagcgagacggcgcgcccgcggggccgccgcacaacccgcagccgggtccgccgacgcggcacgactgtacggtggtggagctggactacagcctgaccgatcgcgacacgacgctggtgcagcagggcgacaagctgggcctgatctccaccgcgatcgacatcaagcccggcaaggacgaccggctgctgctgggtgaccagctgtatcacttcatcgacctgcagccgttgtcccccggcgggcaggtgctgctctacgagttccacgcccgacgctaa

SEQ ID NO: 536836 - DNA, 237 bp, Stenotrophomonas maltophilia
atgaagatgatcgcactgcggccacggccgtccctgctgctgttgctgctggcgtgcgtgatggcagcctccagctgcgcgacgacctcgccacctgcaataccgctcgcctgtccgaagccgccgccggcgccgtcgaacgtgaccaggcagcccaactacgagcagaggtcgcgggagctcttgttcaaatcgggcgagacgcggacgaccacgttcgcgcctgccaggcagtga

SEQ ID NO: 536837 - DNA, 198 bp, Stenotrophomonas maltophilia
atgaacggaaaatgcccgaagtgcgagaagatcttgaacaacgtgcggatcgcggtcgttgactgcaaggagggattagcagggagaagctggagaggggcctcatacgcatgccccttctgcaatacgattcttagcgtgcagatcgaccccattgctatcaagacggacatcgttaatgcaatcaagcgagggtag

SEQ ID NO: 536838 - DNA, 543 bp, Stenotrophomonas maltophilia
atggcgacccgccgcctgattatcagcatcgaccctggccggaccggcgccatcgcggcgctggtcgacggagcagcagggcaagtgatcgacatgccgctgctgactgtcggtgagaacccagaggtcgacgcccgcggcatcgctctgttcatccgcgcggcgaaggacttgaaccccggcgcggaggtagtgggggtgatagaacgggtgcgcgcgatgccgcccaggaaggggccggacggaaaggaggagcgcaaggccggtccccagtcgtccttcaactttggcgaccactacggcaaggccaaggcagcattcgagctgctgggcattccgtatctgcgggcggagccagccagctggaagcgccgcttcgggttgactggccaggacaaggacgccgcccgcctgctggcgatccagcgcttcccggccgtcgcgctgcagctgcagcggaagaaggacaacggccgggcggacgcgctcctcatcggtctctgggccgagcaccagctggccatgggccaggccgccgcatga

SEQ ID NO: 536839 - DNA, 711 bp, Stenotrophomonas maltophilia
atgatctcggcctcaatcaaaaagggcgcgcaacgcaatcgttgccttctcggcgagagcctccgccctgagcagtgttggcgcgaccgctggtggcttttcgaactccatcgcttctcccgtctcattgtcaatactgccgttccattggtcgtagtaactccaatcatcaaggaggctgaccgcctcggaggcgcttgcgatggatcgctgaagagtggttccagcatcgccaagctcgtgaagttggaatccccaagcctcgaccacaatggcctctcgaagcgacgtatgagcttcatcgacatcccactcctcggcgtctctgtcgctcatcaatctgacaatgtttcgaagtcgcgtatgcagcagttctgccttcggcattacatgcagggcgtaggtccgagccttggcagcatcttgcaggcttcggcgcctttcgtcacgccgggagagtgcaaggggtatcgcaatggccacgccgatgccgacgacactaccaatcgcttggacccatgccggcaagtcgctcgagaaaacaaaccgcccagtggtagtgggactatcactcatcaacgcccatgtgcacacgaccccagccaggaaagtcatcgctgccacaacggcccagtctcgatcagttcgtccttgcgtcacggcatcactcctgtaggtgcgcgaattctagcgtcaggagtgcggctatga

SEQ ID NO: 536840 - DNA, 732 bp, Stenotrophomonas maltophilia
atggagctgatcacagttctgcgggagaagcgcacccagccaatcattgatggcttgccatctccaggtgtagcggcgatgggtgcccagaactcgttcgtccacgccgcttcactgtcgaatggcacgcgaatgaccaatgcatcaccggcgcgggagtgcagttcgaaagaagcacctggttggagcgcggacagctgtgccgcgtcgacctgtgccgttcggcttgctgcagcttttctgtcagcggacatgcgggccagctcggcaccgctaacgctgagcatgtccaacgttgtgggatcgatggtttccgaccctggcaattgcttgccgcaaccgctctcagccctacccggctttagcagccaatcccgcagccacagcctgggattccagtggtcaggcagcatggggcgcctcctgctggtcgtcgttggcggccggggggccgaagacgtccgggcgcagcagatggcgggatacccccgtcgctgcctcaatggcgaggacgtggcgaggcggaacgggccggttgccgctgacccactgattgacggcctgcggagtaacgcccagcaggcgcgcgacaccggcctgaccggctcccaacttctcaacggcggtggcgattgcgttcatgccgccatcttaagcatcgctttagttctcggtcaagcgatgctttcttacataggcgagctggcagttggacaatcaagcgatgcttga

SEQ ID NO: 536841 - DNA, 543 bp, Stenotrophomonas maltophilia
atgagaacccttggttttatcgccaccgccatcggtctggttatgctgctcatctcctgcaacatggatgtcagcgtggcaacggagctaggctccagggtgaacaacatcggtctgatgcagcaacagtccatgctggtaaacgtcagcctgggcctgatgctaatcggggtgatcatgtggatcgcgggtcgcaagaagctggagagccctgccgaggtgcctgacgagatccggagctacagtgctgaagagatgaaggatctcgacgtgcttcttgccgacaaaggctggaccgggatttcgctgagcgcgagcgatcctaaggttgtgcactcggtagcagcggaatcttcagccgcgcacgcgggcatcctcccgggcgaccggatcatccaggttgacggtcagttctccagcaacgacctgcgagccaacgttatgcagctggccggcgaaccaggctcggtggccgtgctcaagctccgccgcggtgatgctgcggtcacagcagaggtagtccgcgaggcaagtggcggctga

SEQ ID NO: 536842 - DNA, 297 bp, Stenotrophomonas maltophilia
atgagcgccaccaccgcgagcttcgccgttatcgaagtaccaggctgcggcatgcgcctacgcgtcatgaaggatccagctggttggagcgtatccggctggcgccgcacgaagggcgcgatggcaatggtcgtgttcgcatccaccgaatccgcgccgaccttcagcgacaccgccggccagcaccacgtcatcgccggccgggcctacatcgcactgccacccgagagccggacgaagctgcaagccttcgtcacagcgacggagggtgcatccgcccaaggcggtgtcgcatga

SEQ ID NO: 536843 - DNA, 522 bp, Stenotrophomonas maltophilia
atgttcaagatcgaaaagaaggtcgccacgatcaccaacctcaacgtgcgcatcgagaagcacggcgaggagcggaatctggcggtcgacatcagcttctccgtcagcacgagcaaccaggtgctggactacttcgataaggacctgcgcaagtcgctgttccgcaaggccgccaagggcgagcagcagtccctgccgaccatcggtgagcccctgaccgagatcaagcatcccggcctggagcccatcaagctcagccacgaatacaagggctacgagctgcagctggacggtgagctcgatagcacccaaccgatcttcctcacggacatgaaggtgaagaagttcggcgtggcggcgaaggaaggcggcagcgtggacctgaccttcaaggcctccggcaacgtgacgcccgacgaagtggccgagctgaccgaagcgctgatccgccagtccgtggtgctgaccctgcagcagggccaagccaacgcatccacgcagcaggaagacctcgctgcctga

SEQ ID NO: 536844 - DNA, 294 bp, Stenotrophomonas maltophilia
atgaccagcaccaccacggccaccggccgcatccagctgttcgacgtcgacagctcgcagatccacagcatcggccacgacgccgacaccaacaccctcgctatccgcttcaccaagggctatggcgacaagcgcggccccggctcgctgtaccactacgccaacttcagcgccgaggagttccaggcgttcaaggacgccgactccctcggcaagcacttcagcgggtacatcaagaaattcccggagaagtacccgtaccgcaaggtcgccgagcagcagcaggccgcctga

SEQ ID NO: 536845 - DNA, 366 bp, Stenotrophomonas maltophilia
atggagtacgtgtttgaagctgtgcgtgactcgagcacgatgtttcttccaggtgcgcaacaagttcaggaccgaatccatttgctccctaacaagctgggcgagcgtctggcgatggtcatgggtcttggcgtcacgatgaacaacgttgcttcgagcatgctcactcgcttcgatgtcaaagtgcttgacaccaggcgcgatctgaagagctttcgctacaacggaaatgcgcgtgacgttgaccagtttagggagcttctgaagaagctctccaccgagagcatttccttggcgaaggcctttggagagtatgtggagctgccgagccacgatttcgaaaaatgggcaatcccttccagctga

SEQ ID NO: 536846 - DNA, 291 bp, Stenotrophomonas maltophilia
gtgactgacaccgcacccatcaagatcttcgccgtcaccgattccgaatggtggattggcactgacctcgcttccgtggtgaaggccgcccaagaggaatatggcctggacgatgaagacgtggccaatgccatcgaactggtcgatgccgacctcgactcgctgaacttctccgacagctatgaagacggccagccgactggccagaagcgcaccttccgcgagcagctggccatcgaggtcgccgccggcggctccttcccgcgactgttcgccatggaggacttctga

SEQ ID NO: 536847 - DNA, 1914 bp, Stenotrophomonas maltophilia
atggctgacggctcccgcgcgccagacattcgcatcaccccgaagtcccgcactcgcgccgcgctggtcggcgacctgttctgcggtgccggcggcctctcgaacggcgccgcgcgcgccatgcgggagttgggccggccggtgcagctgatcgcagtgaatcactggccggtcgccatcgagacgaaccgccgcaaccatgcggaccatgccgaccgcatccactgcgcggacctggaatcggcgctgccgctcacgctggtgcccgaaggccggctggacctgctcatcgctgccccgtcgtgcgtgttccacagccgtgcgcgcggcggccggccggtgcacgaccagcagcgaatggacccttggcacgtcgtccgctggtgcactgagcttcgggtgggccgcatcctggtggagaacgtgcccgagttcatggaatggggcccgtgcagcctggtcaccggccggccgatcaagtcccgccgcggcgagtacttccgcgcatgggttgctgcgctcgaggccgtaggtttcaaggtcgactggaaggtcctgacctgtgcggactacggcgaccccaccacgcgccggcgcttcttcctgatcggtcgcagcgacggcaagcgcctgcgctggcccgagccgagccatgaccgggtgggcggtaccgacctgctgggcagccggcagcgctggcgcggtgcccgcgaggttatcgactggaccatgacgggcaacagcatcttcagccggaagaagcccctgaagccgaacacgctgcggcggatcctggcgggtgcgcagaagtaccgctggccccagccctacaacgacgcagtgcaggcgctgctagacggcactgcgccgcgcttggtgttcaaccgtgcggacgcgatcgcccagggcctgatcgaggttgaccccatgctggtgcacctgcgtggcaccagcaagcagcacctgcaggccacggcgaactccgcagacgagccgctgcccacgctcaccgctggcggcagccatgtcggtctggtgctccccaccagcagcggcggcgccgcgcgcgatctcgaccagcccctgccgaccatcaccaccggcggcgccggcagcgagcgccccgggtgcgcacgaccgcagctggtcgagccgatcatcgtgcccacgtcgaacaccagcagcgccggcgtgccgcgctctgccgctgagcctatccgcacggtgaccacggccaagggcggcgaccaggcgctggcagtgccgctggtggcccagtactacggtgccacggccaccgcgcagtctgtcgcggagccggtgccctcggtgaccaccagggcacgcttcggcctggccgagccgatgctgatgcgcgcctcccatggtgacagcgatggccgcgacccggccggccgggtgctggatgctgacgcgccgatgccggcgctgaccggatccaacgagatggcgctggctgaacccatcgtcatgcgcggcaacgtcggcaccggccggcctggcgacatgcgccgagcgagccagccgatgcccaccattacctgctccgaatcgctggcgctggccgagccgttcctggtgccgaacttcggcgaggccccgggccagaccccgcgtacccacagcattgacgaccccatgccgaccgtcactgccaccggccacgtgcagttggcaactcctgcagccaacgtcgccgacgaggtccgcatcgacatcaactaccggatgctgcactggcgcgagctggcccgggccacctcgttcgatgacgagggcgaggtctacgacttcgccggcaacgccaccgagatcaccaagcaaatcggcaacgccgtcccaaaccgcaccgcaaaggcgctggtcaaggccctgatgcaggaggccgcatga

SEQ ID NO: 536848 - DNA, 627 bp, Stenotrophomonas maltophilia
atggctgaatttctgtcaggccggcgggcgaagtcgagcaatgtgccgctcaaccgcggtcatccccagctgcattgcatcacccttgttacggatcacgccctcgatacgcatctcaacggaaacgccgtccacagtggccgagtagcggaaaacgtcatcgacctggctggtaatggtcaacatgaagctgtgaccctggatcacacctcgcatcgttcggcggtagccgacagtgttcataggctctgcggggttgtgggcgtccgacaatctacctgtctggttcaccaagagaaagagccgagtttggcgttaccagaatctggcgggccgattggctcggcagtctgcgggatcgagggttctggccagagctcgcgctgccgatataccagcagccatggcttctgctcggctggcgaagtcggcaccagcatggacctgctcgaggaatacagcttccccagctgcatagaccaggcccatcgacttccacaggttcggcgagcaaacgtcctgccccgccactgccaccagcgtaaacacaccctcgtgctcgtccatacggtctccctccctgagtctaggcgtcgacagtactcccccgatggagcccagacgtga

SEQ ID NO: 536849 - DNA, 774 bp, Stenotrophomonas maltophilia
atgcaatccggacccggcagatccctccctctgccgggtctttttttgcctgttgtctggatggaagagcgcttcttcgtctggacgctctgcgaactgaagggccccgccggggcaggcaggggcgtgggcaaatgtcccccggcgccggccgttggccgccacctcctcctttactttgcccagacccctgcccgccccgacgaggctcggcttgcggcaggtaaagcgcaatgctcgcagcagcctttcaaggaggcgccgataaactccgaacgcagggcggaggcccttgcgtacgaagtaaagggggaggtgacggccaacggccggcgccggaggacattcgtacgccagggcctccgccctgcgccatgcagaatcaatccgccgcacgcgcgtcttcgtccgcaattgccgcgaacggatgggcccggacgaagcttaacttgcggcagtaaagcgcagtgctcgcagcagcctttcaaggaggcgccgaaaaactccgaacgcagggcggaggcccttgcgtacgaagtaaaggaggaggtgacggccaatggccggcgccggaggacattcgtacgcaagggcctccgccctgcgccatgcagaatgaatccgccgcacgcgcgtcttcgtccgcaattgccgcgaacggatgggcccgacgaggctccgcttgcggtagtaaagcgcagtgctcgcagcagcctttcaaggaggcgccgaaaaactccgaacgcagggcggaggcccttgcgtacgaagtaa

SEQ ID NO: 536850 - DNA, 300 bp, Stenotrophomonas maltophilia
atgagcgtgatcgcactgctgttggcggccgccgccttcgcctgcctggccatggcaatggaacgccaccatcgcgacgtcaccggtcatgcaccggccgcggcgcgccgccgcgtgctgcgcctgctgggtgcgactgcgatgctggccagcctggcagccagcatcgcagcctggggcgctgcacagggttttgttggttggtgcggcgtgctcgccgccggctccggggccatgctgctctggctcagtttccgcagcccggccaagccggcgccacgcccgtcttcccgttcctga

SEQ ID NO: 536851 - DNA, 1053 bp, Stenotrophomonas maltophilia
atgttccgcaagaaggatccaggcaatagtcccaaggtcgagcagtcggtcgccaaggcggtcagctacgagatcaccgtggccgacatggcgcgtcgcagcgagcgtcgggcctggtgggtggccacaggttcattgctgatgtcgctcgcactggccggcggctactactacatgctgccgctgaaggagagagtgccgttcctggtgatggccgatgcctataccggcacggcgacggtcgcgcgcttgaccggcacgttccagggccagcagatcaccatgaacgaggcggtcaatcgcagcaacgtcgcccagtacgtgctggcgcgcgagtcgtacgactcggccgtgatggatctgcgtgactgggagctggtgttcgtgatgtcgtccgatgaagtcggacagggcatgcgccagcgctactcgggcaacaatccacagaatcccttcgtgctgtacggccgtggcaaggccatccgggtcaagatcctcagcatcacgccgttgggtgcgcagcccgacggcggcttccgtggcgcgtcggtgcgcatccagcgcagccttctggacaagcgcacgggtgtctcgaactacctggacaaccagctggtaacgctgcgctttgactacaacaagaacctggcgctgtcggaacaggatcgcgtgttgaacccgttggccttccaggtcaccgagtaccgcgtcgacaacgactattcgcggggcgtaccggtaccggatgaaggggccatccaggcgcaggcgcaacaggctgcacagcagcagactgcgcagcaggccgcgcagcagaccgcgcagcaggcacaggggttgtacgacccgaacaatccggcggcgaccatgatcgaccccgccaccggacagccggtcgccgcaccggtcaatggccaggttccggggcagcccgtacccggccagccgatgccggcacagccggtacaggggcaggcgatgcccgggcagccggccatgaggccggcgcagaacaattccaccggaactgctgatggagcaagcaaccgatga

SEQ ID NO: 536852 - DNA, 123 bp, Stenotrophomonas maltophilia
atgctcgactgctttcctgtgcagccgtgggtgcggaccaaggtccgcacccaccacacgcaccaaagcggtgccgatcaggcgcgcagcgccgccagcgattcggcctgcagccgctcgtag

SEQ ID NO: 536853 - DNA, 426 bp, Stenotrophomonas maltophilia
atgccccgtttgaacaccgccctggcactgaccctcgttctgatgctgctgggcgctatgcctgccatggccgtggcggcaggcccgcaggtctccactgaagtattcgtagagcgcggtgacaaccccaccttcgaactgcagcaggcgccggccattgtgtattcaacagacctcaccacaccgcccgataccttgccgcagtttcccttgcaggtgctgttggtggctcagctggatgagctgggccacataaccaacgtgatggtggcacggtccagcgggcggcgggagtttgatcgtgcggcgcttgatgcggtggatgagtggcgcttcgatccggtcgtgattgagggcgtcgcgaagcatgcgcgggttcgggtgcgtttgatcttcacgccggagaccgaggcgcctggcgcctga

SEQ ID NO: 536854 - DNA, 606 bp, Stenotrophomonas maltophilia
atggtgcaggtggtggcgttgctggcgttgggactggccgccggcttcttccactatcgcgtgggcttgctgctggagccggtggatgatgcctgcggtggaccagatcccatggcgcgcatgcaggtggccgaacagctgatggcccgctctctcgcactggctccgtggcaaccgttgcagtggattcccatggccggcctggtgctggcgctgctgggggcgatctcgatcagcgtgtaccggctgggccgcctgtcggaccggctgcggtgggccaactgggcggtgatggccctgcacggcgtgatactgatgctggcggtgagggccctgcatctatatgacatggcgtggatcagcgtggccaagctggcaccgaccacctgcctggtggaactgggcgagcaggggcggctgccgctggcgcaggcgcaggaggtggtgttcggcattctcacccgccagcacgccttgctgctgcgcaatccggatgatctggctctggtcctggccgcgctgctgctgatggcgatggtggccgggttcatgctgtggcgggcgatcgtgcgggccagatcatcggaggcgctggaagacggctaa

SEQ ID NO: 536855 - DNA, 1143 bp, Stenotrophomonas maltophilia
atgggaaaagtgggcggaacgatcgagctttcatggctgagcgagctgacgcgcatcgcggccaccctccgtgagaatacgtcgctctttctcggcggcatcgtattcctctgcggggcatccgtcgcgaacttctgcatgcaggagcgaatggcgatcaacgttctgtcgtcggacttcgtggccttcataccgctgttcttcgcgatcatcgtcctgttgattgcgctgattggcgggttgcttgtgtacaactgcgcgctggtcatggaaggcgcggcgaggagcaggaaaggcaggctcctggccgtcgcaatcattcccaatcgagggcccttcttccgcaatccgctgcaagcgtttgcaatggggaatctgtcgcgatggctgcttctgctgtggtcaccgggcctgcttctcacggctgcgtgcctatggatggaactcgtcgatacgggcgccacggcccaggcaatcatcctgatcttcgcggcgctcctcagcgttgcggtactggccgtctgcggacgttggatacgccgcccgcaccggcaccgcttcaagcgccccccgctcctctcatgccttccctcggcaatcctgcagtcgctgaccatgttgccggtaggactcggggtcgcccacctcgcgaactccgctggatatggatcaaccgcggtcctgctggcggtcgccttcagtacattggttcttgcgcagggccagttcgttgccgttctcgccatcgtccgcagcagccatcatggcgtggtccggcaggcgttctggggaggactgctggcggtcaccctggcctgcatcgtccccactacatccgctccgatcacgcgcgcgatcctcagcatggggagcacagggatggccggctgtgttcgcctcgcaattgaccctcaagcgaggccgatggcatcgctgattgaccgaacgctacagcgcgatgcacccgtcgtttggacgaagcccttggggcgtgtcattccattcggtgaatcgttgcaactgaagctggctgaagagccttccgccgtctatatgctcgatcgaaaggatctgcgccagaccctatcgtgcagggaggcagacgacaggatcaaattggatgctgggcactccagaccttag

SEQ ID NO: 536856 - DNA, 324 bp, Stenotrophomonas maltophilia
atgatgctctttctgctgctagtgctaggtgtcgccaagacccaaggcgcctatgacgaagtccaggaactacctgatggccagattctgctgatgcgcactctggattgggatctcggcgacggcagccaagaacgggtcaccgtgcactggctgctgcgggaggatgggaccatgcgctacgactttggtcggcagccgcccgaaacccaggaggtccatcgacgctcctgcgcgctacagggcatgcagccgtcgcgtggcgttggcatgattgcaggggaaggaaccacccacggcttcacctgtagcagccagttgtag

SEQ ID NO: 536857 - DNA, 1320 bp, Stenotrophomonas maltophilia
gtggtgggggtcggcaacaacggcggggatggctacgtactggcccgccatgcgctgcaggccgggcgcgaggtgacggtggtcgccttgccgggcaggccagcgtcgaccgcgctggcccagcgtgcggcatcggagttcaggtccgccggcggcatcgtcaccgatttcgccgacgcgctgccggtggctgatgtctgggtggatgcgctgttcggcctcggtttcgatcgtgcaccggagggcgtggccaaggcgctgatcgacgcgctcaacgcgcaaccggcgccgcggcttgcattggatgttgccagcggcgtcgacgcagatcgtggcgtcgtgccgggcgtggccgtgaaggccaccctgaccctgcagttcatcgtgccgcatcgtggcctctacaccggtgacgcgctggagcattgcgggcagaagccgctggcaccgctgcagctgccagcggcggcgtggcaaggcgtatcggcggccgctgagcactggacacagccccggcttcaggcgctgctgccgccgcgccgcgcaaacacccacaaaggcgaatccgggcacgtgctgtgcgttggcggcaaccatggcagcggcggcgccatcgcgatggcggccgaggcagcactgcgtgccggcgccggcctgctgagcctgggcacccgccgcgatcacgtcggccccttgctggcgcgcctgccggaggcgatgacccacgcgctggaagacggcgctgcgctgccggcgctgctggacaaggcgacggtggtggcgatcgggcccggcctgggccaggacgaatgggcgcgcgcgctgttcatgcgcgtgttggtcagtcccaaaccgctggtggtcgatgctgatgccctgaaccttctggcgcaggaccctcgcgcgctgcccggcgccatcctcaccccgcacccgggcgaggccgcgcgcctgcttggctgcagcagcgctgacatccaggccaaccgctatgccagcgcgcaggcgttggccgagcgcttccacgccgtggtggtgctgaagggcgcgggcagcatcgtggcggcacccgggcagacgccacggctgatcgctgcgggcaaccccggcatggcggtgggcggcatgggcgatctgctcaccggcatcattgccagcctgcgcgcgcagggcctggccgcgttcgatgcggcggcggccggcgccttgctgcacgcactcgccggcgacgccgctgccaccgacggcgcgcgcggcctgcttcctactgacctgctggcgccgctgcggcgactggccaatccggacctctctccatga

SEQ ID NO: 536858 - DNA, 3582 bp, Stenotrophomonas maltophilia
atgaaccgcatctatcgacgtatctggaatgccgcccggcagtgctgggtggtggccagtgagctgagctcgccgcgcggcaagcccgcacagacgcgggtgctgatgtctgcacttctgctgacgacggcaagtggcgcctttgcggccaatgaaacggatgacctggagccggcttcggaatcccgcgccggaacattgcgggttcagagggagttgatccctctgctgtccttcgccgcgcagaacacagccgcatcggccatcgcaccgcgtggcttctacaatcaggtggccattgtaaccagcggaaactatgcagatgcgcaggtcagcggtgctgatgttctggcgctaggctcgcgcgcaaagatctacggcaccgaatctaccggcttgggcaactacgcagaaaccagtggcggatacgctactgccgtggggcactacgccagggcgtttggtgggcatggcaccgctctcggtaacaaagcgtacgccaatggcaagggtgcaaccgcgcttggccatgattcgcaggcaacctcgagcaatgccgtagcgattggcagtggcgcgcgtgcgactcaaatcgattccgctgctgttggcgcgaactccacagcctacgaagcccagacggtttcggtcggcaatagcgggcaaaggcgtcgcatcaccaatgttgatgcggggcggtccggtaacgatgcggtcaacgtcaatcagttgaacaacacggaccgcaacgttgcgacagtgcaggctgttgccaataccgccagaaacacagcagatagcgcgcagtccactgcaaacacagcacgcgatacggcaaatgcagtgcggaatacggccaacagcgccaagagcgtcgccgacgctgtgagcaagcgtctcagcgacacgacggtgaagataggtgcctactcgtccgcagacaaggcggatggtgtggctgtgggtgcttacgccgctgcagggctgggcggcgttgcggtggggcgcagtgccagttcattgggggaccgttcggtagccgtgggtaacggtgcgacggccaaggagatctacacgtcggcgctgggcaacttggcaagcgcgtctggcaccggggcttccgcactcggttacaacacatctgccgaaggaacgttctctacatcgattggttatggtgccagaaccagggagcgagggtccgtggcactggggtatcgtgctgaagcattgcatgagggttctgttgccctgggcaatgagtcccagacgaatgggagctaccaggtgtcgatcggcaacgcgacacggaagcgaaagctggtgaacatgtccgacggactggtcgcgcagggaagctcggacgctgtaaccggcaaccagctttacgcaaccaacgcaactgcggcaggcgccaaggcagctgcagattcagcagttgcccaggtcaaggcctcgtcctacctgctggctaacggtacggccggtagcgatacaaccaaagcaaaggcgacgggcacgggggcgctggcaagcggcatctacactgaggccagcgggacggctgcaaccgcgatgggccgcacggccaaggcattggcggagggggccatcgccatcggcgatcgcgccggcgtcgaatctgttacctccaagcacagcatcgccatcggaaccatggcaaagaccggaccgcaggaggatctgctggccattggtcgcaatgccaatgcctccggtggggccggggcgatggccttgggttatgggagcacctcaagccatctgcgttctgttgcgcttggctcgggttccaccaccagtgctcaggaccaggtgtcggtgggtagcacgagcatcaagcggaagatcgtcaatgtagcgaatggcagcgttacctcgaccagcaatgaagctgtgaccggtgcgcagctcttcagcacggacaagctcgcacgagacgcgcagaccggtgccagcaacgcgctttccaaggcagtggcattggaaggactggtcaagcaggtcagcgtcgccggtgatattcgcatgggttcggaaaacaccggcacggttctggatatacggaacaagaacgacggcaaacggaagatcagtggactggctgatgccgccttggttagcggaagctccgatgcggttaccgggagccagcttgctgcgacgaacgaacgcgtaacttctgctcagagttcggcagacaatgcactgtcaaagattgatggtcttgagtcaaagtcgaagtacttcctggttggttctggagggccgggcgtagccgccgagtccggtgcggcagccgttgccattggcgattccgctaaggcttctgtagcctcagagggggcagtggctgtcggaagcttctcaggcgcactggcgaagaactccgttgcgcttgggcgcgcagcacaggttcatcaggatgcagagcagggctttgcgcttggcgtgttctcttacgttgaagagttcaatggtgttgcactgggcgcaggtagttctgtgaataaaggcgcggcagatgccgtcgctgttggcgccggctcaattgcggacgcgacaaggacggtgtcctttggttccacaggcctgaatcgcaggctcgtacatcttgcccgtggttttgaggaccacaacgccaccaccgtcggccagttgaacgacagcctcgccaccctcggcggcggcgccaagctggacgccaacggcaatgtgacggcccccacctacagagtccagaacaccgaccaacgcaccgtagagggcgcgcttaccacgctcgatggcgccgtcctccgcaccacctcccgcgtcgacggcatggaaggccagctccgctccatcttccaggacacccccaccgcccgtgccgacggcttcaaccagctcaccctcgccggtgcgcagggcatggtcatctccaacgtggccaacggcctgattgccgccggcagccgcgaggcggtcaacggtggccagctgcacgcggtgcagcagcagctcaacggccgcatcgatgggctggaacagcgcgtagacggccacggcccggcgccgcagtcgcgtgccatggcgctggcatccaccgagcaggaggcagcggcacccacgccgcccgccacgcaggacgacaaggtcgtcgccgataccggcagcgcaccgaagtcctcgcccgcgccgcagcccaaggctgaagcgccggaatcgccgaagccgcaggttgacaccgccgagctggagaagatgctggcccgcgccaacgactacagcgatggcatcgcccgcgaagtggatgcgcgcctgaacaagatggacaagcgcttcaaccgcatggcggcgatgagcagcgcgcagaccgcgatggcgatgaacaccgccggcctggccacctacaaccgcctcggtgcgggcgtgggctatgccgagggcgaatcggcgatggccgtgggttaccagcgcgtgttgaacgacaagggttcggccaccttcagcctcaatggtgccttcaccaacagcggtgagcgcagcgttggcgtgggtgtgggtatcggctggtaa

SEQ ID NO: 536859 - DNA, 1311 bp, Stenotrophomonas maltophilia
atgcctcagcttgacgacgtatttggagttacatcacgcactgtcctctcgtacgtggaacgcccccaagtcgatgacagctttagggaggcgctcggcgccaacaagcaaatcatcgtgtatgggtcatcaaagcaggggaagacggcgctcgtttcgaagcacctcccatacgacgaaaacattctggtcagtttgacccctaaaacccaggtggtcgacatctatcatgcaattctctcaaaggccggcgtgcgtctcgtctcgtcaagcacagagaagagtggcaatgaatcgagtgcgtcagttgggttgcgctttaaggcaatgattcctctcttcgggggagcagaggcatccagcgacgggaagatcggcgccagttcgggtagcgagaccacgtacgaagaggttcctttgaacttggagctacctcagcctgtagcggacttgctcaagcgggtggattgcaataaatgggtagtccttgagaatttccattacctttcagatgaggcacagaaggaatttgcctttgacctgcgcgcgtttcaggaacttggcgtcaggttcgtaattctcggcgtatggcgcgagaaaaaccgcatggctcaatttaacggcgatctccttgatagaactatcgagatacctgtagagccatggaccgacgtcgactttagaagagtttgcgctgaggggtcaaagaagctaaacataaaattcgacaacgaattacttgaaaagtgcatcgaagtttcattctcaagcatcggcgttttccaagagcttctcaaacatatatgcatttccgccggggtcacgtcatcctcttggaaggaagtgatcattgattcgaacgagcacctgaagtcagcaataaccgtaaaaacgaacgactacggagcccgtcatgaacgcgccctagaggctatagcagcaggccacatgtcgggcgggcagaagggcgaccagctaccactttaccttccctactacctggttcggacaattgttgagcacggtttcgatgggatcgcaaatggtgctcggaagcaggtcctatgggattggatcagagggatccaccatcggggtcaggatgtgcgaagcaacgacatgacgaatctgcttggtggccttgcccacctacaatctgccaaatctatctcccctcctatatttgcctatgacgcccagcagagaattcttcaagtagttgattccacgttctatttcttcatcaagaatgtggatccaaacgaagtagtggattcaattcaaaacccggtccaggaccagcttttctag

SEQ ID NO: 536860 - DNA, 384 bp, Stenotrophomonas maltophilia
gtgaacaaggcatggatcatcgcatcaggattcgcagttgccgtagtactggcgctggctgccatcagcctgcccgcgcaggcatccggcacacagttcagcttctactcggacgaacagaaggacggattccagttctcccttgaaatccaaggacgcaacgacgatggctacattcatgcgacctggacgggaaaggtggacaaggcaccaccacgtaatccgtactacgtcgaaatgaaccgggaccagaaacggttctacgtccgtccacgtaagcgcgatggccagccctggttcgagctggacgtcgtaggtgatcgcgggacgttgctgttccagggccgccgcatccacggcactgccgactgggaaatcaggtag

SEQ ID NO: 536861 - DNA, 630 bp, Stenotrophomonas maltophilia
atggagaaaaaggcgcatttcatcaagggatcactgcgacgcagtgtcgagttccgagaggaccttcagaagttcctggagctgggaccggacgcatggccggccaccaagaaggctagcattgaagccgttcagggcttgctatacggggagaacctcactgatgctgctgcaaagcttgaggctactcaggccgaagctcagcgcatggcggtcatgttccgattcctcacgggccgattggcggagggcggcgacccgctcgagttcgtagatgaccttactgaattggcaggcaaagccgatttcgacccgcgccatcgggaggcgttggccgcgatcctagtgccggagccccagctgcgggcagaggagcgcgagcgcgaggctttcactttcgggaacactatcgcgagcgtcgaaaccaagagcatcgtcacattccatctggacggggagcccttcacgggcgttagcgtcaccatcaattaccttgatggtggcaacaatgaccagtccatctcgctcaacatgagcagtggagaaattcgagctatcgctaatagtctgatccactcggccgacaaagtggaaagggagctcgccgccatcaggggagcaaatgcatga

SEQ ID NO: 536862 - DNA, 1248 bp, Stenotrophomonas maltophilia
atgccaccaatcggtcgccctagaaaggcccctccgaacttgccgtcccacatcgactacagcttggtgcctcccggtatctactgggatcgcacgggtcgtggcagatggtgcgtacaggatccgcaccctgaggggcacggcttcaagaggaaaacggtggccgggccgactgctcgcctttccgatctgcacgcaatcgctgagggccggcgcggggaggcgcagcgcggcaccatcgcgtacgtgatcgaccagcatgccaagagcctggcgttcacccagctgcagccctcgacacagcagcactaccgcgactacgccaaggccattaaggcctacccgttgaagaacggaaccgtactgggcgcggcggtagtggatcgcctgtctccaggctttataaggcggctgatcgacgtgatcgctcagggcagaccgggcctgaagccaggcgatcgggccatccctggctaccctacgaaggccaaccactggctgcgatatctacgcagggttttcggctgggcgcgggagcatgaccacgtcacgacgaacccggcggccggtatcaaacaggtaaaggagaagagtgcccaccgcatgccggcggtcgacgtgttccgcaaggtccaagcctatgcgaaggaatgcagcgtgcgcgggcctcgggccaaaggtgcagtgccggcgtacctgtgggctgccatggagttggcctaccaggcgcgcctgcgcggtatcgaagttcgaacgctgaccgatcaccatgtcgagggcgaggtcctgcagaccaaccgccgcaaaggtagccgcgacaacctggtgcgcaagggggagcagaccgaaatcgcgatcaaggtcctacaagatcgacgcgctgcaatttgggccaagcgcggaatcaaccagttcaatgcaccactgttgccaaagatgcggccgctgttcgtaagtgaggatggggaaatgctcaccgcacatggttggcacaccgcctggggccgactgatgcggaatgcggtgagggaaaaagtaattgcggcggacgaacgcttcgccctacacggactgaagcatcgaggcgttaccgacaccgatggcaacaagaaggaggctagtggccacaagactgatgcaatgctccacgtctatgaccactctctacctgtagtagaagagtcgtccagcggtgctccaatggaaaaactatcgaccaagccattgaggcgcccccttaagggatag

SEQ ID NO: 536863 - DNA, 399 bp, Stenotrophomonas maltophilia
atgagcgaatctaggggtctgtctatcgctgagcgcttgaccctcgccacgctgaggttgattgccgcaggcgggagcgtagatacgcagactgcgcagaatcttttcaccctgaaattggtaaccactgcggcagctacacagttgagtgctggcggcgaagctctgatggatctgttggaaaccagagagaaggcctacttcggcaggctttctatcgggaaacttctgtccgatgcagacgaactcgatttggctgtggcgaagaaggaggaagatgtgcaacgtctgacctaccagccaatggatccgtacttcagcgaccggatcgagcgttacagattgctgactgggcagtccgaagctgccgcgggtcctcaaggtagccctcccccgtga

SEQ ID NO: 536864 - DNA, 225 bp, Stenotrophomonas maltophilia
gtgatcggagaagttctacagttccgcgatctgcaggagctgtgccggcccggcaagcgcccgcggctggcgacagtggagcgttgggctaggcagcgcaagatccgcgttcaatacgacgggcaaggcggggtctggaccacgaccgccgcgttgaacgaggcacttggtctgcaaagacaagaggaagagcgagaaaactacatgatctcagaactgatttag

SEQ ID NO: 536865 - DNA, 252 bp, Stenotrophomonas maltophilia; identical to SEQ ID NO: 350846

SEQ ID NO: 536866 - DNA, 651 bp, Stenotrophomonas maltophilia; identical to SEQ ID NO: 350847

SEQ ID NO: 536867 - DNA, 273 bp, Stenotrophomonas maltophilia; identical to SEQ ID NO: 350842

SEQ ID NO: 536868 - DNA, 294 bp, Stenotrophomonas maltophilia; identical to SEQ ID NO: 350841

SEQ ID NO: 536869 - DNA, 171 bp, Stenotrophomonas maltophilia; identical to SEQ ID NO: 350840

SEQ ID NO: 536870 - DNA, 672 bp, Stenotrophomonas maltophilia
atggactatcaacgtaggatcgcgtgggcggtgatcgggattgttgccgctggggcagctgcaatgtggatgctcttcagtggttcgacgctgggcggtccatcttcttcggcagaggaaactaatgccgtgccagagcgaagtcacgcacatgaaccgcattcggccgcgccggtggtgatgacggaagggcagaagaaagctagagccgaagaaggtcttgaacgtgcggagcgctcgttcaatgatcgtgcggtgcggctcagagatcactatcctgccgcgaatgacgcggctgatgcccgggcggatgagcttcgggccgccaccgcaaagttcacatttgccgattcattggatcaaagagagcgcgagatatcagagagaggcgccattcttcaaggcaaactcaagggccagatgcgcgcactgttcgcgtcgacaactgaagagtcattcattaggcgaggaatggatgcgcgcgtaacagcaggtggtgcggagcaggcgacgctgcagctcaactacgtgcttatgtctcgacctctcgtctatcaaattaccaatgaatcgccgataagacaggaggcacggagtctgggattcaagcgaatagtcttcacaaataacgtaagcggcagtccctccgagtcttggactgtcgacctgtag

SEQ ID NO: 536871 - DNA, 3375 bp, Stenotrophomonas maltophilia
atgcaagcaaggaatctcacgctggtggagatcggcgtgggcgcgctgccgtccgcgtctccggtagtgcagcggttctcgacctggttcccggtgccgttcaaagccccggatgtgcctccggccaacggcgtgaccccgaaccctgtagccgatggcgtcctgattgaatgggacgccatcgaccaggagggcgtgatctacgtcatcgagcgcagcgaaagcgaacaagggccgtgggtcgagatcagccgcatcaccgaaacccgctacctctacagcgacggcagcggcaagaaatggtggttccgcgtgacgccaaccgtccgcggcaaggtgggggagggggcgattgttggcgtcattcccccgacgaccagcgcgggcttggccgagcaacaggccaagctgacagccgagataaacgcacgtattcaagccatcgcagacgaggcggcggcgcgcgctgcggggttggaacaggccgcgagagaccttctcgctgaggcacttgttcggcagcagggcgtcaccgaagccatgcaggcgatcagcgcggagacccaggcgcgtatcgatgccatcctcaacgagaagatggatcgagaggccgcgattacccgagaggagcagctacgtcagagcgcggatgattcgctggcgcgcgctgtgtcggaggttgtcgccggcagcgggacgcagttcgacagcatcaagctgtggccgttcaaccaagatacggagggttggacgggaaacggcgccccgacgttggtcgatggctggctgcgacccgcaaaccacagcagcgcgccatgggtacagtcgcctgttgcgcttgaagtggacggcagcgcctatcgctttgtgaagctgcgtctaaagcgtgtgggcgaaccgacatggaagggcctgctgcagtggatcaccaccgttgagcaggattgggacgcggcgaagagcgccagcgcgcaagagcctgtatgggacgcaaatggtgttgccacgatcgacgtgcaggacgtggcatggtggccggcaacgatcgatgcaatccgccttcaggtgggggctgctcagaccgtcgccgactactacctcatcgactacgtcgcggtggggcgtccccagcctggcgcgtcggtcgccttggttcaggaggagacccaagctcggatcgccgcggacgccgccgaggctggccagcgcactgcgctggctgtgcagatgcgtggcaactatgaagggagtgacgtggcgggggtgcgctcgggcctggtggccagcgagcgcgatgcacgtattgacggcgatggggtcaatgcgcaggcaattcagctgatcaatgctcgcatgccggacggaaacggcaaaacagcgagtgaggcgagcgtccagcagctggcgcaagccaatgcggccgagcacgccgcgatggggcagcagatcgatcagatcagtgtgagcctcggtgacaaggccgacagctcggtcgtggctcagcttcgatcggaggtggatacgattgatgggcaggtgcgggcaaactcgcagagcctgaccagcctcaccaatcgggtggctttcgcggagggcggcgttgccgccaattcgtcagcaatcagcgggcttgcatccacggtgagccagcagggagagacgatctcggcccacacgcagcagctcacgcagatcggcgggaaggtcactgacttggagggcaaggaacttgccaattcctcggcgatcagcgggctgaccacccaggtgacacagcagggcgggcgactggatagccaggctgaacagcttgcgcgcctcaatgggcaggtcaccggccttgatgggagggtgctggctaacgctggcgcaatcagcgggctcaccacgcgcgtaacaaagaccgaacaggacatcaccgcgcaggtgacgcgttccgaccgcatcgaggcgcgcatagctgcgtccaatccgaacctgttgcagaacccgaagtggacgaacggctgggatagctggtctgtgagcgacggaacaaacatcggattcagcgagtgggacggcacttatgcctacatcgcgcagatcgctggcgactaccgcttcattgtccaatctgtcgccttcaacggtgccacgaacactccgtttacagccagcgtagacatgtaccgcaatgacacgaatggaacgatgttcgtgcgcatcggcttctacaacgcacagaaccagttgctggcgtacagtccggccaccaatgtcgatgctgtagtggcgaggtggaagcgctacgagagcactggcaattctccagcaggaaccgctcgtgttcagttcgaagtatgggtttacaacacggcagtagtgaactcattccgacgtgccaagttggagatgggcgtcaccgctacgccgttcgatgagggccgcaacactgacacgttggcggttggcttcaacaatctgaacgtggcagtcaatcggcatgagggacagatcagcacgcaggccacgcagattcagggcgtccaggcgtctctgggtggcaaggccgactctgcggtggtggtggagatggacgcccgaatgaaggacaccatgaccggcagcggcaatctgctggagaatagccgcctgctggatgggacgcagggctgggaacagcgctggaaccctggcaattggcagatggggcccagccccggcggtttggaatgggaccctgagggtgtgctgtctttcggtggtgggcgttacacggccggtgacgcaggggcatacggcgtgtggggtaacaagcggcgcatccccgttgtccccggtaagcggtacttcgtcagcagctatgcggcgtgccaccgatgctccgtccgtgtgggcatcctgtacatggacgccaatggcaatcaggtcggcggcacatataccaactggtacaccaacattgcgcagggcggccgttcgcttgccaactggcggcgcatctacgcgagtgcagtagcacccgccggtgcggtgtacgctatcgccgagttctggggctacgccaacctgtcggcggaggcgtcgcagttcttctggcacacgatgatgcagctggaagaggcgcagatagaccagcgcctgccggggccgtattccccgggcggtgcggagggtagcgcctcctaccgtgtcaacgtccgcgctgacggcaaggtgggcggtatccagctgggcgtgaacggcggcgtgtccgcgttcgacgtggtggccgaattgttccgtgtgtcgcctggatccgcatcggggcagcgcacggagtacagcgaaggccactggcggtgtttctacccgaacggccagttggcaggacgatggggttggtggccgtaa

SEQ ID NO: 536872 - DNA, 645 bp, Stenotrophomonas maltophilia
atgcaggcgcttaccgtggtgctgcgccttgtcgaacgactggatcgcaggctcgacaacttcgcggcttatccacgcctggtcggcgtcggtccacatgcaaaagttgaggcgcaggatctcgttgagcttgctcgggatctgtttggccaggtcgacccggccctgcaggtattcatccgtgatggtgatacccagcatcgggtttgctttcacccagcaggccggatcctcgagcggctcgtcgccctcatcaagcccgcacacgaacgagaacgtacggtcatcaatgacctctccgacgaaggtcggatcgttcacggcctcgtggtggccagcagccaccttgaccgcatgctcatgctctgcccaggcaacgctgttccggtcgctgcccgaattggtgatcatgaacagcaatggggaacggcggaacttgaagccgttctccatcatttcgatgatcttgccgtccgccatctcgtgcacttcgtcggccaggacgaagtgcggccggtagcccgatccagtcttgccaacgtcacgagacgccggccggaagtagctctgcgacttgtggtgggcgatgttgtattccttgccctcaccgcccgagaattccagccgcttcttcagcgccggtga

SEQ ID NO: 536873 - DNA, 1053 bp, Stenotrophomonas maltophilia
atggagatcaacaagtcagggacgacggatgggggtggcctttcaggcggtgtcgacagggccgatgcgattggcgtcggggtctgcttcgacgcgggacgaaggagcgacgacagcggtgccgaggacggtgagaacgcttgggaaggcaggcacggcggcatccaggtcccaggcggcgacgcgatccacgggcagcgccaaaacgacagccagatgtgcgtcgctggacagaccgagcttggcgagaagatcccgtttcgtaactggggcgagcccggcgaagggcccgaaaatttccgggcagaggtcatggcgcgaaacccctgtgaccgattcgatggggatggccatggctggcggcacgcgcccccgcgagcgccaattgctgacagcgctctggcgaacaccaagatgggaggcaagggatgtgaccccgccggcggctttcacggctctgtcgagtgcgtccatttggggagaatcacatatcgtgatccttcgcgcaacacaattcgtgttagcgccctatcacataccgtgaagaatcccggtatggccttctccgacaacctccgcgccgcccggctcaaagctggcatgacccaagaagcattggcactcgcgtgcggctggtcgggccaaagtcgtattgccaactatgagtcgtcggctgccagcgcacgcgaacccaaggtttcggaagtacccctgctagctgcggcgctaggggtcagtatcgcgtccctttttggggaggccccggcgtctcagtccccgcgacccgatcctgcaatccttgccgaaacccaccggttcctggacaaggcgttcggcacgcttggcaaggcttttgacattgagtccgaggcagatcttttcgctgacgtatacgaatggatccttgcagacgaacgccctgcagatcagcgcaacctggtggattttgcggcatggcgcgagaagcgcgatctacacaggggagctgtaagaaatgagcaaaacggacgcgctactgcacaagctggtcgaacggataagcgccgcgcctga

SEQ ID NO: 536874 - DNA, 255 bp, Stenotrophomonas maltophilia
atgccagggtcactccggttgttcgaagaagccctgctggaagggcgcgtccgcttgcttggaaaccccgtgctggtgtccgcaatcatgtcggccgtcattgagagcgacaaatgggagaaccgctggctgtccaaggcgcgttcagtcaacaagatcgacgccgcggtggcggtagtgatggccttcggctccgcacattcatcggtcgcgcccgcctctgtctatgaacagcggggcatccgattcttatag

SEQ ID NO: 536875 - DNA, 147 bp, Stenotrophomonas maltophilia
gtggccgtggccggctggtatctggcctatggctacggggtgaagccgctggtgatttacgcctcccgcgggatgacggtgtggcgcgatggcatgcggcagatcccgatcacccgatatgccggcccgatcccggagtttcgctga

SEQ ID NO: 536876 - DNA, 192 bp, Stenotrophomonas maltophilia
atggccaccctttccctgggctgccgatcggcagagataaaagtcaccactgaccccgtcagtgagcgcgtcatcgcagacatgggcgccgcccgcctgcacctgaccgccgacgaagccgagcagcatgcccacacgctgctcgacgccgccaaccaactgcgcgccgcgcagcagcgggccgcagcatga

SEQ ID NO: 536877 - DNA, 474 bp, Stenotrophomonas maltophilia
atgagcaagaagcaccggggccggttcaagggtgatccggtcacttatcaactgccgagcccggcaggcggcgtgcaactggaaaccttcgtgccctggacgctggtgaagcggggcttgaagaagcaggtcatcacgcccttggacgcgccgcaggaattcctgtccgaggccacccgagagcgggaggcgcggtcggctgcgcaggacaccgcgttgatgcgggcgctcggactggcgcaccactggcaacgcctgctggatgagcagcgggcggcatcagtagccgagatcgccgaggccgaaggcatggacgtgacgcaggtgcgccgggttatgcggctgacgctcctggccccgaaggtcgtggaacggctggtgagctcgcccgatgccgtgctggagaaagtgatgcgccgcccctggcccaacgcctggggcgaccagatgcgcgtgctcgcgccacccgggtga

SEQ ID NO: 536878 - DNA, 207 bp, Stenotrophomonas maltophilia
atgaagcagatcgacaccatcctcaccctgatcgcccagaagcatctcggcatcgacaccctgcaaacccgccacgccgacagcctggacttccacgaaacggcggtctggtgtatccgggacgcgctggaagcggccttcaaggcgggcgtcgaagtgggcatttcgctgcccgcgccaactgaagcagatatcgcccgcgactga

SEQ ID NO: 536879 - DNA, 291 bp, Stenotrophomonas maltophilia
atgagtaatcgattcaagcacgccgtcatcgacgacgtggcctcgcgcaacatcgacgccagcctgcaaggccatctgctcgacctgttcgaatcggccatgaagtcagtggccacgacgttggtgcgagaggccaaattcgacactaccgacttcgccaccgccaaggcgcgaggctgcgagggatttgcgctgctggtgagccgcacccgcgccgactctcccgacggctggttcggcgcgtttcaacgcggcgagcagcgcctcgatgtcattggccacctcgagtaa

SEQ ID NO: 536880 - DNA, 1398 bp, Stenotrophomonas maltophilia
atgcacgatcttccccgacacacgcaatacaaggactctggcctgccgtgggtcggagagattcccgttcattggcagacgcggcgcaatcgctttctgttcagagagtttgatcgtcgttctacacatggcgaggaaacgcacctgtcaatgagtcaggtgcacggtcttgtgccgagcaagagtctcggccgcaagagccttcagtcggagagctacgcgggtggcaaactcgtggaggagcacgatttggtgctcaatcgcctgaaagcgcacctcggcgtttttgcgcgtgccaaacaggctggcgttgtcagccccgattacaccgttcttcggcccaaaggcgaagcatccgttcgttactgcgaatcgcttttcaagacgccaatgtatgttgctgagtttcggcggcgaacaaaaggcatcgttgaaggcttttggcggctctacacggatgacttctacaacgtgccaacgctgctgcctccaccggaagagcaagaccagatcgtcgcctacctgcgggcgcaggacgcccacatcgcccggctgatcaaggccaagcgcgatctcatcggcctgctcaccgagcagaagctgcgcatcattgatcatgccgtgacgcgcgggatcgatgcctcggtcgccttgaagccttccggtatcgagtggctgggggatgttcctgaacattggttgatcaaacccctcaagcgctgggttcgcttgaatgcgagcgccttgggagaaaagaccgatccggatttcgagtttcgctacctcgacatcggttctgtgaagaccgggcgattagcgaaggaactcgaacgactccgttttgcaaatgcaccgtcgagggcacgcagggtattgcggcgcggcgacacgatcatctcgaccgttcgcacatacctgaaagccatctggtacatcaacgaagatgctggcgatctgatcgcctccactggctttgcggtgttgacacccgggcgggaggtcgagcccgaatttctcggctacgtgattcaaagctctggcttcgtcaatcgggtcactgccaactcaatcggtatcgcctaccccgcgattgcggaaaccgttctcggccgctttcctgttgtgatgccgccgacgttggaagagcagcaggcgattcttgctcatatcaaggccggaagtgcacctctggatcaagccatcgaacaggcactgaccgagatcaaactgatccgcgagtaccgcgaccggcagattgccgatgtcgtcaccggccaagtggatgtgcgcggatgggtgccggggcctgatgacgtggtggccgaggaagacttggccgcacttggcggcgacgaagaaatcgataccgatggggaggaagacgatggcgacgactga

SEQ ID NO: 536881 - DNA, 900 bp, Stenotrophomonas maltophilia
atgcatccccagcgcgtcgagagcttgagccacgcccagcgcgagcggctggcctatatcgacttccggctctacttcttcggtgagatcggccgccccgacctgactgagcgcttcggcgtggctccggcgggggcgacgcgcgacttggcgctgtaccgcgagatcgcgccgcagaacatcaccttcgacggtagtcacaagatttaccgcatcgggcaggcgtttgctccgctgttcgagcacgccccgcagcgcgtgctgtcggcgcttgctctgggcttcggtgatggtgtgaacggcgcgacgctgccgttgctgacctgcgaatcgcccaccgtcttaagcagccccaagatggatgtgctggccccgatttgccgcgccatccgcgccaagcgcccggtggcgatccgctaccactcgatgagcagcggagagtccgagcggatcatcgttccctttgcgctcgttgacaccggtctgcgctggcacgtccgggcctttgatcgcaagagcggagagttccgcgatttcgtcatcacgcgcattgaggccccgaccctgctcgacgaggagccacaggcccacgagcgcccggacaacgacatccagtggacgcgcatcgtcgagctgaacttcgtgccgcaccctcgccttgagcgccccgagatcatcaagatggactacgggatgaccgacggcgcgatccggatgcgcgtgcgcgcggcggtcgcgggctacatgctgctgcgctggagcgtggactgctcgtccgaccaccgcctgaaagaagaacagtaccgcctgtggctcagcgatccgctggcgctgtacggcgtcgagaacgccaagctggctccgggctaccaagccccgagcagcccaaagaaacgatag

SEQ ID NO: 536882 - DNA, 1518 bp, Stenotrophomonas maltophilia
atgcccacactttttgcctggcttggtaactcagaccttcgcgcctcggaagatgcgtcgggcacagacttcggtcccatcttgatggcgctggagaccggggtgtatgaccgtctagtgctcctgtcagatcacggtcagcagaaaacgcagaacttcgtggcgtggctgagcggcaaattcacgggggctacagaggtgcggtacgcaaaactgcgcagccctaccgatttcgaagacatatacgtcgcagccaacggagcggtgtccgcgacgctttcttcttctcctgagctgccggtcacttttcacgtgagccctggtacccctgccatggctgctgtctgggtgctgttggcgaaagccaagtacggggccaacctcatcgaatcctctcgtgaacacggcgtgcgtcctgtctttgttccattcgacctggccgcagagttccttccagttgcgagcaagcaagctgacgaagctctcgcacaccttgtccaaggattgcccccggcagcaccggagttcgccagcatcattcaccgctgcaatgcgatgaagcgtgtagtcgcgatggcgcagcgattggcgcaacgggatctgcccgtattgatccaaggggagtccgggaccggcaaggaactctttgcacgtgcgatccacgcttcgagcaagcgaaagggcgctccctttgttgcagtcaactgtggggccatcccgctcgaactgatcgactccgagcttttcggtcatgaaaagggtgcgttcaccggtgcccatgcaacccgtgctggctactttgaggcagctgatggcgggacgctttttttggacgaaatcggtgaactgccgctgcagtcacaggttcgattgctgcgcgtactccaagagcatgaggtgacgcgcctgggggccagtaagtcccgaaaaattgatgtgcgcatagtcgccgctaccaaccgagttctgccggaggaagttcgggcggggcgattcagagaggatgtgtttcatcgaatcgcggctggcatcttggcattgcctcccctgcgcgctcgcgaaggggacctcaatctattgatcgacgctttgctggcgcagatcaatcgcgaagcaacttcccagccgggctttaaacataagatattatcggttggcgcaagaaatcttcttcttcgccacgcctggccgggcaatgtgagggagctgcacaacgcgcttttgagggcgtccatctgggcgccaggagaggagatagccgccgaggatatcgatgaggttctctcgctcacaaccaccggcacagacggcgccattcttggggccgcacttggcgatgggttttcgctacctgatctgatggcagatgtggcccggcactacctggatagggccatggagcagagtcgtggcaacaagactgaggcagcgaagctgttgggtcttggcagttaccaaactttgacgaattggttgctcaagtaccagtccaaaaaagctggcacggatggtgcataa

SEQ ID NO: 536883 - DNA, 819 bp, Stenotrophomonas maltophilia
atggggtttgccaaataccaagaagacatcgtgagtcgatacgtcggcgatctagcgatgcgttccatcaaggtgccggtttcaccacccaagccctcaagcccgaatgccaaaaatcaacctgatcaaaggacaaagaagatgagcagtctcaaaaaattcgctgtcgccacgccccggcctctccccgtgatcgtcttggctgacacaagtggcagcatgggggagaacggcaagatcgaagcgctcaacgctgcgatgaaggacatggtgtcgactttcgccaaggaaagtcgtttgcgcgccgagatccaggtgggcctgatcacctttggtggcaaggcgcagatgcacttgccattggttgcagcgcatggcgtcgcaggattctcggaatttaaggctgacggtgtcacgccgatgggtgcggcatttgatctcgctcgtcagttgctggaggacaaggatcgcatcccctcccgagcctatcgccccgtcttgattctgttgtctgatggacaaccgaccgacgattgggaggctcctttcaaggctctttgcgactccgagcgggcacagaaggcgacccggctagctatggcgattgggccggatgccgatgaagcaatgctgaaggattttgcgaacgacgtagaggctcctattttcaaggcccacaacgcccgggacatccaccgtttcttccgtgcagtgaccatgagtgtgaccactcgcacggcaagccaaaatccagacatctcaaccgcattcgttgtcccgcccccggatgatgacgcgctggacctcgacttccaatga

SEQ ID NO: 536884 - DNA, 705 bp, Stenotrophomonas maltophilia
atgaggtttattgcctgcggcgcgagcgtcatcggcccccgacacctggatctgggcgagcaaaatcaggacgcgatggttctggcgggttgccgtggtggctggattgcggctgcagcagacggtttgggatcgcgagcacgtagtgatctgggagcacgtagtgcctgccaagttacccggcggatcttgcgcgccacatcgagcagtttcgatctgccggcaacgctgcccttgattcatcggcaatggcttaaagcgattggtccgacaactcctcgagacgccgcgaccacgctgctgttcggccgcgtgacagatcaaggcgaggtccatgcagcccaattgggtgatggtcttctgttggtgaaatgcgcgggcgagttccgtcgcgtcacgccagagcgcacagcctatggcaatcagacttgggcacttgagtccacacacctgcaggacaaatggagctgtacgaaaggccgattcaccgagccgggtgatggcgttgtcctgatgacagatggcgtggccgatgacctcgaaactgcccatcttgccgacttctttgatgcgctttatcaagacgtgagcactcggaatcggcgcagaggtaggcgctggttgcagtctgaattgaatgactgggcgacccccttacacagcgacgacaaaacactcgtggccatttttaggacgtctgaatga

SEQ ID NO: 536885 - DNA, 1428 bp, Stenotrophomonas maltophilia
atgagcacagcaacaccagaggcaccaaagaaaaaccggacggtgctagaccaacacggtcaatcctatgagctgacggggcgtatcggcgaaggcggtcaagggatcgtttgcacgaccaactaccccaacgttctcgtgaaagtcgcgcgtgcaaccacagaagaaaagcgagccagttggacgaacaaaatccgcgcacttatgcgtcagccacttgatggcctccccatagctcatccgcaagccctcatcacgcagccgcagccgggttacgtcatggaattgatggatggactggccccaatgactgaactgatgcaggtggcgactgacgccttgatgtcagatgatggcctatccggctatgtgaagacaggcggtctgttgcgccggttgaagatgctcgcgcgactggctcgggtgctggcggatctgcatggtcgaggactcgcctatggcgatctttctcctgcaaatgttttcgtatcccagtcactagagtacgccgaagtctggttgatcgacgccgacaacgttgcgagtcagtcgcgtgacggtcagcaaggtgtattcacccctgattacggggctccagagattctgaggggagagtccggcatcaatacactgaccgacagctggagttttgcggtcatggcgtatcgcatcctcacgctggttcaccccctcaagggggacgttgtgcttgaaggtgaacccgagcgtgaagaggcggccctccgaggcgaactcccttgggtagatcacccagttgatcgcagcaacgccttgtcgataggacttccccgcgaaatcacgctcaatgcgccactgcgtgcgctgtttgaacgatgcttcaatgccgggctgaacaatccgggtgagcggccaagtctgaatgagtgggcagatgcattcgaggctgccacaggccattgcgatcaatgcgagtcttgcggcagcacgtttttctacacctcgaagcacatctgtccattttgcgatcacgcccaggacacgaatcgcacgatcctcttgcaggaatatcgctatatgcctccggatctgctccgggagggcttgccggaagatgttccagagtcgttgattcgaaaagagtgctggactcgcacaggcaaggcgatggttttgagtatgagccctgccgagttaaagactttgcctttggggacgtccctgtacgcggatgcccgtccgctatgcactgtcgaacttgctcaggatgggttgtgggtagagccatcagtcggtaagcaagtttccttgcagagagcatctgatgacaaagtcgtcgcggttgtgcgtcgtcagcggctcaagtcagacagtcgttcaggagtgtctttctggctccacctaggcgcagtagaagaagagcacgtcgtctggcgtttcaactggtga

SEQ ID NO: 536886 - DNA, 3315 bp, Stenotrophomonas maltophilia
atgaaactctgcgactttcctcttctgtcgggtgaacttgcccagttcacatgtgacgacctgggagccgattggcaaatcggtgaggccgtgtcagtacaggcacacggtaatgactatcttctccgacagggcaactccgtttgcgtcggcaaagtagaaggacgccaagatcgaactgcgcttcaggtccaacgaggcctgacgttgtgggtgttaagacatcggcatggcgaggttctccaccttcaatcgctggatttggtcgagcagatccagctggatatggcgatttctgttgatgaggccattgcggagcaattggccagcaggggtgagatttctgctccagacgtacccactgcagttggttggttgaatgagcaattcatctcagctgaaaaagcaccgaccgcagaaatggatcgtgtttttcttggccgcttcgagaacgcttccgatgagagtttcgttctgtttggtgcaggctggcgcggcaacgtcaaacgagatgctggcgtgctgaaactgatgagcgtcactcgtctcaagggggctacagcacgtgtagcgatggccgttggcaagatctctttccaagatgccagtgtcgccgtgcgtctacagagtacagagcaacgcgcacttttggatgccgcgctgcgcgacaacggcagctacctacgtttatggcaagagtatggtgcgctcgaatgggagcaggctcgagattgtgcgagggaactgggttctcttcgcttcaagagtgcggagctcgtcgaaggtgaactgtgggcctggtttctaaaagttgatgcggatcacctaagggatttccggaaacgatggaaagctttggggctggcgaacacgactcaagtggagcttggggatcgggagcttgatcttgattccgaggttgaagacgtgccgggcagagctgaccgagcacgccgtcgcccggttcgtggtgtattgcggttcgagcgggatggcgtggtcttggtcccgagccaggaccggcgctcagaacgccccacaaccaaggggttcatctactactcactatcgggtgatgaagctgtacagacccgtcgtgcacgcgcaaggcaatctatcaatgaaggacggcgactgccgcaactgagctacttgctggaaggggtggctccgccaagcgcccggcgacgtcagctcgacggcttatccacctacgccaaatcttgcttcaagggtgttccgaccaagcggcagattgaggcgctggagaaggcgatcaatacacctgatatcgcacttatcgttggcccgccaggaacaggtaagactcaggtcattgcagctttgcagcggcgccttgccgaaacactcggtgaaaactcgctgcagcaccaagtgctgattagcagttaccagcacgatgcggtcgataacgccctgaatcgtgcagaagtctttggcttgcctgccgttcgaattggcggtcgagggcgccgtgacgaaggcggtgtcgaccccgttggtgtttggtgtgaacgcaaacggaaagaaatctctgttcgactcgacgcgattcggctgaatgagccgctgactcaaccattggaagagctagatcgacgtatcacagcattgagactcgcgagcatgtcggcacaggaacgccaaacacagttcgagcaaattgatgttcttttgcgtcagctgttcgatctagacgttcgtctcccggcccaaattaaggaccgatgggatgagtttcttgcccagcagaagagagtcgaaacccagcgtcaggccaatgagcctgctgggcttgtgcgcttgttgagggctctgcgcaccagttctatcgggttcgccgacgacgggccggacagagctcaccagcttgagcgcacgctgcggcgcagcaacgtcaaacttcaagattcggaatggagcttgctccagcgactttcaacggttgccgatgccactgaagcagatcttgctgaattggctgcgtttaagcggtccatgctggatcggttgagccccgattacaggcccccacagctaaagcaagcgttgagcggcgaagcacttgttctcttggccgacatcgagcacgcaatcgacgcgcctttgcgtcaatctcgccgtggcatctctgcggtagtggcctcgtaccacgcggcactttcccaagcccccaatgaggcagcgagagcggtccgcgagtacgccagcattgtcggtgcgacctgccagcagtcagctggtaaggcgatgagtagtttgaaagagttgagcgacctagatgcatcagaaggaattgagttcgacacggttgtcatcgacgaagccgccagggcaaaccctctagaccttttcgttcctatggcgatggcgcggcgtcgcatcatcctggtcggcgaccatcgacaactacctcaccttgttcaacgagagttggaagacgaactcatttcgagacaaagcctgactgaggctcaagcgaaggcgtatgagcagagtctttttgagcggctggtgaagcagcttagggagcaagagaaagtcgacaacatcaagcgcgtcgtgatgctcgatacgcagtacagaatgcatccgacactgggtgacttcatcagcaaacagttctatgaatctgagggattggacgtcttgcactcggggcgacctgcggaggatttcgctcacacgattcctggctaccaaggcaaatgtgcggcttggttggatgtgcctctgcaggacgggaaagaaagattcctaaaacccggttatgaaagacgtgcggaggcaatttctattgcaaaagaggttaagcggattgcagattcttgtgggccgtcgctgagcattggggtcatcagtttctaccgcgcccagtgtgacctgatacttgatgcactggctgacgagggcttggcagaggaagaggatggggaaatccgtatcgcgcgctcctaccggcagactgaatcaggtgatgagcgactgcgcgtcggcacggttgacgcgtttcaaggcaaagagtttgacctcgtcttcctgtccgtagtgcgagctaacgacgtggtgattcccgatcagaaggaaggggaagagcgcgaacgattgctaaacagcaagtatggacacttgcggttggcaaatcgcatgaacgtggcgatgagtcgccagaggaagctcctcgtcgccgtcggtgccaaacacatggcagaagggcccgagtccgaggaaggggtcccggctctggctgcattcctcaagctttgcagagaggggatggcgcatggccgctga

SEQ ID NO: 536887 - DNA, 1464 bp, Stenotrophomonas maltophilia
atggccgctgaccgctatcttcgcttcgatgtccgtcgccccccgggtgggcggccgcttctgtggcctgtccgcgtttggaaggtcctttatccaacaaatcgtgtcctcaagttgaacctgttccagcaggcgatccttggactggcaagggccagatgccaggacagttcggaaatggctgagttgctggggctggaccgagaactggtggccttcatcattgcaactcaactgatcccgaacggctggatgaacacctcgggatcagtcacctctcaaggtgagcgtgtcctcgaagaggctcaggatgccagcgaggaagtccgcatggggtacgcatatcaggacgcgatttcggggaactggctgccgcgattcactgaagaacttccagagatcgaagcgaagcgagtcgatgaacgtggttacccagtgttcctgcgagacctcgattccggaaaggaggatcgccccttccgcctcaatcacttccgagaggacacattggacacagcggccctctttgatgcgtttcagcgctatcgaacggatcacgaccacgccaagcagcgtgatgacgagctttcggcacgtgtccgcattgagagcctgagcttcgtcgaagattcggcgcagccgatgtggttatggacatggatttttcccgacgaggctgggccacaaccctggttggttgccgatccattcgggttgcagcaggctgcgtcgtggttgcgcaaacccctgcaggaagtcttgccgcgaaacgatggacttgcaagatacatcgctgacgcggtaggcgagacgagatcgaacgatttgtcggcagaggagtggctccgatccctggagaatcagatcgacttgacactgcttgcagactacaactggtcgcggaaggtgccgattgttgagggatacctcgccagcgttctgagacgaagatccgtgctggctagtcaggagaggtcttggcaggaggatgtgactagccttctcattgagactcacaacctggcagaaagcgtgctgcagtggctgttgaagcaattttccgttgatgtccgcagacttccagatagaagccaagacaacaagtggacgaagcaaatcgccgtacaaacattgcaggcgctccccatagcaaaactcgacgacgaattagttagacgccttgcgtcacagaatttgcgagaaattagaaatgcgctgatccgaggcaatagctcactgaaagctctgatgtttgctgcactgctttctaccatcgagcactccgaccaccccttcctcaagctatccgctgatgagcttcgactgactcgtctgcttgatatggcagatgctcgcaacaaaaaagccgggcattcaggtagcgagagaatcgatagagaagaagctatggaacacgctgactttgtcatcgactgggttcaaatttttaagggctggtattga

SEQ ID NO: 536888 - DNA, 2373 bp, Stenotrophomonas maltophilia
atggcaaaacacaataaggggaacaaagccccagtcgcgcaaaacgcaaatactgcacaaagtgcggtcgcatcggcatggcagaaagcaactgctggaattggctcccttgcatcgctggtgcaaggcgatgcttccgctgtggcactccctgacttggagaaagatcaggtcagcgagttggataaggtagagcccgagaaaaaaatcgagctcgagaggttgctggcggatatctctgatgccgcaaagagagttcgtgatctacatgaagacgcacagaagcgcaccgatgacctggctcgcaaggaggaggcattctcccgccgaagcgatgagaacaagaagcgaaccgaagagatcaacaaactcgacgaagagttgaagcaaagacaagttgagataaaaaagtccgaatcaagtttggccgataaggagcgtgagcttgagaagcgagaactggatgcgcgttccggttttgccgcccaaaacgtggccgcactcagtgatctcaagaaagaaatcgtggagcttgagtctaggaagactgagattcaactcggcatccttcaagcggagcagaaagcacgtgacgatgagtccgcgcgcgcatccgaagtgatggaacgtgaagcggagattgcaaacaaggagagagctctacagcagcagcaacggcgactagatgcagagtggaaagagcttgagcgtgaacgggtacagatccgcgaagattcacttcgcgaggccagtcaggaaattgccagattgaccgatgctcgactacgcgcagaggcacgccttgaaaaggtttaccgtgattggacattgactgaacagaaactagagcaataccgggagttctcagaggcattggcagggaggtctgcccgcgagatacttgacgagttggctgctcagaaacgtcgagtcactcaattggaaaaccaaattgcaaacagtcaggatgatcagttgcaatttgagaacgaggcgctgcgaaaacttcgtgatgagcaaaaggctcaactcgacgaggttcattttgatttggctgatgctaaagctcagcttcatcgcctccgcctcggcgtgagtgacaaagagaacctcgaaagagaaaagcgtgccctggaaaagaacaatcagatcttgagtgcaaggctcaatgacttgggcaaaacggtagatgacctaacccagtcacagcaatctgagaagccgttccctcaaatggcatggatggattccgcatccactgccgattggatcaaggatcgcaaggccaaggagttgagcctgccggagcaagacgttcctgatctgaaaaaattctcggttgaattgcagcaccggatcgctcaagcggaggaaggcgcgatactgcatttcagcctcgaagatattcagttacttattgccgggttggccatgagccagcttcacatctttcagggaatcagcggcacgggtaaaacgagcctggcgaaggcgttcgcaaaggctgttggagggcactgcactgacattgccgtccaagctggctggcgagaccgtgatgatctactagggcactacaacgcattcgagaagcgcttctatgagcgcgactgcctgcaaggtctctaccgtgcgcaaacagccgcctacaaggaccggtgcaacatcatcttgctggacgagatgaacctgtcgcgcccggagcagtattttgctgaattcctctcggcgctcgaaaagaatgacccaagagatcggctcatcagtttgtcggagagccagttgccaaacgcaccagcgctgctggtcgagggtcgaagaattcgggttccccacaacgtttggtttgtaggcactgctaaccacgatgaaacgacgaacgagttcgctgacaaaacctacgaccgtgctcatgtcatgacgcttccccgccacgaagctggattcaatgtggagccgaagccgatggccagctttagctatggatcattgatggagcgtttcgatgctgctgtgacacaaaacgctgatgaggtttcagagttattggcggagttgaccacgggcccgctcacaagcatcttgcaggatcgctttgacctgggttggggcaatcgactcgaacgtcaggccatgcgatttgtccctgtttacatggctgccggcggtcgcaaagaggatgctctggaccatttgcttgccagtagagtattcagacgcgggaaggtcactggcagatacgatgcgaccatcgatgatctagccgccatcgaacaagcgctgaccacagtatggaaggggtggaaatcggagcctcgccgttccattaacttgttggctgaagaccgtcgtcgtaaggaacgtggggcatga

SEQ ID NO: 536889 - DNA, 1824 bp, Stenotrophomonas maltophilia
atgatgtttctggaccgccttacgggtggcaaactcagccgcctacccgacgcacttctgccggggcggtattgcttgcttgagccactcctggtcaatggacacagccgcttgcagcccggtgatctgctctcagatgacggctcgggcgtaatccggactcaagacacagaatcgcaagtgctcgccatcgatcagtctgacgacgatcaggcggactgcgatctgtcggcagaagcgattatttccatcgccgggaaaatcgctcacgcacatgatgcaaatgtctcacccatgctgcccgctgagatggcagcccaatgcgcgctcgaagaactcgagcgcgacttggcggtggtcctcagagacggtcatctgcattcaatatctgaccgcccccgcagagaccttcgatatgacgacttggttgcgccagtggcgcgagctcgacgcctcgcgacttcggcattaagtcacctggcatcacactctgattgctggcagcagcgtacgctcagcggtattcaaccgcgcaaggttcttgcacgtttcagcgaggacgactatgccatctatgagaacaggctctacaagcgcttactggatcggctagatcgacaccttgccaggagattggctcgcatccggggagtcaattcacgactggagcgagctttggagttccaagactctgagcagacgcattttcgacttcgccaggatatttgtcgcctttggggcgagtcatatcttgatgacaagactgggacgcagttggaggcaggaaagcgtgcactcagcgacttggagtctcagttgcgtgtaatcagaggactcaagcaaagggggctttattctctggtgcctcctgcatctgtggttcctgcccaagttcaccggacaaacattctcaaccacgacccgcactatcgtcatctgcccccgctttgggagaaattgaaagatgatcgagaagaccggctcttacccccggaagagcgcttggcgcgacaactgcaattgcagctggcttacgtcagttacgttggtcttgtgatcaggcgggcgcttgagcggtatggtctgcgcagagtggatggaaatttcgtcttcagttgggcgggacggagtttcgtactccgacgtgatgtacatgattgggtcgtaactcagtctcagggatctaccctgaggatcgtgccgattgcctggttcggcgcgtcaataaatatcagtgagagtctggcgcctggtcgcatcgtgtgttggccaggcgggccaaccagtgtcgcatcgccgcagagtcttcctgtctctccgctggacctttatgtcgtggagaaggtggggaagttgatcgatgagtggatgttgcggcaattgctccaaggtcatggccgaaaattggggccgttgcccacaccggccaaaaggctaaccgaggcttggccagaacagtttgaatctatttcgtctacccatgtcaggctcctcgcgccagtcgatgctcagaaagcagccgaactgaaggcttcactcaaaggctcagctaattcgcaagttgaggatgccgtctgggacgccatcgaacagatcgcaactcttgctgagctttgtggccatcaggcgcgattcgtgcgagggcagcagcaggacttctactgccaatgcggaacgtgccaggcaacttggtcgctcaagacaacagggaaaaggcgacacttttctatgcggccgaagggggcatctgccataccagaagatgacggctttctttggtctgggagggattggctggagttcgatttggattcagaacagtga

SEQ ID NO: 536890 - DNA, 855 bp, Stenotrophomonas maltophilia
gtgcgcctgttccggcaatggcaatcaggcgcggagattccaaagttccccaaggcgctcctggatgcgttcgcggacgccagcagtggcgatgaggcccgaatccgccacatgatcgaagctttggaagctggccagatcgcagccgtggagcaggggctgttcgccctgaagaagcgcttggcggacgccgagcgcgccttgcagaccaagatcaccaagaaggcccagaacgaccagcggattgccatcgacaagatcggcaaggcctcccagcggctcagagacctgcaccgcacaagccccctgccgcgtgacgcccgtttttttccgggcaactacgcgacggtcatggtggccgaggagggcaagcgcgtcgtctatcccatgcgctacggttgccgcccggccggcaagccggccatctacgacacccgctatcacggcacctacaacgcccgccgggacaatctggagggcttctggaaggggcagttcgggcactctcatgccctaatcgtggtcgagaccttctacgagaacgtcgagggcaaggacggcaagaatcaggtgctgcagttcacgcctcgggacggagggcccatgtacgtgccctgcctgttttcccactggaccgacccgaagggcctcgagccggaactgtggtcattcgccgccatcacggacgacccggagccggaggtcgcaactgccggccacgaccggacgattatcaacatcaagcccgagcacatcgacgcttggctgaacccagattccgccaatctgcaggagctctacgccatcttcgatgaccgccagcacccgtattacgggcatcgggaagctgcatag

SEQ ID NO: 536891 - DNA, 369 bp, Stenotrophomonas maltophilia
atgagcggcaagcggtattcggatgagttcaaggtcgaggcggccaagcaggtgatcgatcaggggcgttcggtgcgagaggtgtcgactcggctgggcgtcagcatcgactcgctgtatgcgtgggtcagggaacagcgcaaggcgccagctacgcggcaggtggatgcctcgttggcggcggagaaccgtcgtctgcaggccgagctcaagcgggtgaccgaggagcgcgacatcctaaaaaaggccgcggtgagttcaacccgtcaatgcaacatagggtacatgcgccatccttacggtattgccatagggtgcgcgtgtgcgcggcaagccaatctttgcactagagagcggcgataccagtag

SEQ ID NO: 536892 - DNA, 135 bp, Stenotrophomonas maltophilia
atgagcctgatccagtcggcccgcatgaacgggcatgatccgtatgcctatctcaaggacgtgctgacacgcctgccgacgcaacgggcgagtgaggtcggcctactgctgccgcatcagtgggcgcctgcctga

SEQ ID NO: 536893 - DNA, 1293 bp, Stenotrophomonas maltophilia
atgaagagtatcgccagtcatatcgaagccagcgtgattgcccaggcactggatcagtcagtgaatgccgttttgcttaccgatgcacacgagggcgagggtgggcaccgtatcgtatatgccaatgccgcatttttgcgcatgaccggctatggcgaagaagaaattctgggacaaaacccgcgcatccttcaggggcctgatacttgcggcgaggtcatcaggcgccttcgtcagtgcctggcggacggcacattctttcagggttcgatcatcaactatcgcaaggacggtcgcccgtacgttgtcgagtggagtgtttcgcctgtgcgcggtgcgtccggtgagatcactcattttctatcgcttcagcaggacatcagtgacctgatcgccgcacagaaggccacacagctgttcgaccgtgtactaaacgctaccgatgatggtgtcgtcatcacggacagtcgcggcaccattgagtttgttaacaagggttttgaagaaatcaccggatacggcctgaccgaggtgctcggtcgcaatcccagcatgctcaagtccggggagcagaatgccgatttctacacagaggtgtggaacaccctgaagcaggggcattcatacaaaggcacctttgtgaaccggggcaagaatggccagctgatctactgcgacgagaccatcactccgcttaccgatgagaacgacaccatcacccattacgtcagcatctttcgcgacctgaccacaagggttctggaagaacagatgttccgcgagatggtgcgttttgatggcctgactggggcgctgacccggacggctggagagctggcgctggagaatgcctttatgcagtcgcgcggcagcaaactgcccatgtcgattgccctggcggatatcgatcacttcaagcaggtcaacgatcagtggggtcacagcacgggtgatgtggtactcaaaacggtttcgggaaatttgattgccgcgctcagggccaatgacagtgtcattcgctggggcggtgaggagttcttactgatctttggcggctgcgatctgagtcatgccctgctgctggccgagcgctgtcgccaggctgtagcggacagccagcacgagaatgtcggagttgtcacgttatcgattggtctgggcgagctgcagccggatgaggcgctggcagatctgatcgagcgtgttgaccaggccctttatcgggcgaaaaagactggccgtaatcagacgcaggtatcaaccgccgaagagccgcctgcagtgggaatatag

SEQ ID NO: 536894 - DNA, 477 bp, Stenotrophomonas maltophilia
atgctcgatcccccctcgcccctcctcccgcctggcgtcatcggacctgccgatgctgacgcgccagagcttgcgctgcccctgctgtcgaaccgggtgacctgcggcttcccgtcgccggccgaggacttctatggcgagaacgacgcgctggacctcaaccggcactgcatcctcaaccccgtctcgaccttcttcatgcgggccgacactggggtctcgatggtcaacttcgggatctaccccgacgacacgctgatcgtggatcgcagcatcacgccacaacacggccacatcgtgatcgccatctgggacagtggcttcacctgcaagcagcttcggcatcgcggaacgcgattcgagctgcattccggacatctggactaccccccgatcttggttccccccgacatggagctggagatctggggcgtggtgacttggaacttccgtcaactcctggggcgcaggcgatga

SEQ ID NO: 536895 - DNA, 399 bp, Stenotrophomonas maltophilia
atgagcggcaccgcgcagagctggaagtacaagctgaagccgatggaaggcccccgctggccgctgcggtgccgccacgtatttgccgccgacgatgtcctgcggctgcaggcaggcctgtggccgcgcgacatggacgaccgctgggcgatctggctcgacggcgatgtgttgcggtgctggcgttcctggactggtgcctgcgtctatgaggcgcatctggccttgcacaaggatggatcggccaccgcggtgatgctggacgtgctggatgagccggagacctatgcccgcgccaccaccgaggaagccgagttgcagcgcttcgagggcgtgttgagcctgatccgccagctgcccggtgaagcggaatcgaccgtccacctgcccgtggactga

SEQ ID NO: 536896 - DNA, 1263 bp, Stenotrophomonas maltophilia
atgttcggcctggtcgacggcaacaacttctatgcctcctgcgagcgggcgttcaaccccgagctgcagggcgtgcccgtctgcgtgctgtccaacaacgacggctgcgtgatcgcgcgtagccaggagtgcaaggacctcgggattgggatgggccagcccatccatgaggtgccgccggcgctgcgccggcagctgcggatcttctcggccaacttcgccctctacggcgacctgtcgggtcgggtggtgtcgatcctgcgggaccagttcgcccgggtggaggtgtactccatcgacgagtccttcgtggacttccatggcatccgggcagagcagcgcgagcaggtcgccgccgaggtgcgggcccggatccggcagtgggtgggcattccctgctgcgtgggaattgggccaaccaagacactggccaagctggccaacaagctcgccaagaagacaccccacggcgtcgtgacggtgctgcccggtgatgcggcgctggaaaaattccccgtggaggatgtctggggcgtggggcgccgcctcacggcgcggctgggtgccgagggcatcctgaccgcggcagacctgtgccgcgccgaccccgagacgctgcgggcgcgctacggcgtcgtgttggcccgcacccagcgcgagctgcagggcatcgcctgtgcggacctggaagagagcgagccggacaggaaacagatcgtggtcagccgctccttcggccgcgaggtcgtcgcgttggaggacctgcagcaggccgcggcgaccttcgcccagcgggcatgcgagaagctgcacgcccgctcgctgcaagccaacggcgtctgggtctggttcaacaccaatcccttcaagcccgacgcgccgcaataccacccttccggcgccatgcgtctgatcgcaccgacgtccgacacccgggagttgctgcgccaggcgcagcaactcgtgcgggcgatgtatcgggagggctatcgctacaagaaggcaggcgtcggcctgctggatctgactcacggcgaccaccagcaagcggatctgttcgcacaggccgatccgcgctcgaagagcctgatggaggtcatggatcgagccaatgcgcgcttcgggagaggggcgctagggctggcgtcgagtgcctggcgtccgcgcaaaggggcgttagagaagccggtatggaggatgaatcaggcgacgctgtcggggcgatatacgacaagctggggtgagcttgctgtcgccagataa

SEQ ID NO: 536897 - DNA, 813 bp, Stenotrophomonas maltophilia
atggattgggaatatacgtatcgagcagcgactgccaagcacaggccaacaggcctggtgtttcgcattgcctataactcgactgcgcctggctgggtgatttctctcgagggagaaaggctcccctcggtcgaggctgcccacgtcgccgcactgcgcgacgagcttcatcaactagtgcacgatgcccacacgcaaaggcgggtgtccgagcttttgcatggcccgtacaacggcgactacagccacgtggcagcaattctgagcaggcaaacacgaaagaaggtctctgtgcgcacgcttcaggcgtggatgatgcctgctggccgcccgagcagccgccgatgcccggagtgggccctgttggcactagagcaatacctggcgagcaatccccgagcgccggccgactggcaagagacgagcagcattcttcgcagcacgcctagcggacaaacactggcgttccatacccaactgcgtgatcagcgctccttacaacttgccgaggccgagattgcagaggaagaagccacgctccacaagtggcggtccgccgacctaatggaattggcccagcggttgacggaaatggagatcagctcccggcgcgccacaagcaaccatgcagatatgatcggccagatcgttgcgttgacccgttcctgcgcgaccttcgaagagtttcgagcacagcttgatgaagcgttaaggcggaagcttgatctcgattacacggtcaggcaaatcgtaagcgaccttcgcaagggtcgtggagagttcgctagccctgatggaacacttcctgaatga

SEQ ID NO: 536898 - DNA, 819 bp, Stenotrophomonas maltophilia
atgaacgcatttcaaagctcggaccagtcgacggttgcgctgtactgggatttcgaaaatatccatgcaagcgtattggaccgccgaaagggcgtgggcgcttacaagcaaacacgctttaccaatcaagagcccgtgatcgacgtcgaagctctgatggaattcatagcttcgctcggttcggtggccatcaaccgggcctacggcaattggcaatggttctcacgataccgcgaagtcctcctgcacaacgcggtcgaactgatccagctgttcccgccaggtgcctccgcaaagaacggtgcggacatcaagctatgtctggacgctaccgaggacatcatccggtttccgcacatcacgacgatcgtcatcgtgggaggcgacagcgatttcctgcctgttgcacagaagatcaaagctgccggaaagacgttggtgggcgtgggctgcgaagcaacaaccaatcgccactgggctcatagctgccacgaattcagatactacgagtcccttctgatagacggcaccaagccggccgcctgcgaagacccgaacgaggatatagctcctgcacctgctgaccctgtcgacttgattcgcagagcgattttgcgcctttcagcgaatcgaggagacccatgggttcttaaggccgcgattcggcctatggttaaacggctcgacccgacttttgacgaaagtacttacaacgcctctaacttcgccgatctgctgaagaagcactccgatgtcttcgaggtcagaaaggggcagcacgaccaagaatttcgcatcaaaactacagcggcggcctag

SEQ ID NO: 536899 - DNA, 159 bp, Stenotrophomonas maltophilia
atgaccactttttactacgagtgttacaactgtcagcgcaccgttcgttccgaagacgtggacgacggacatagtggctttgaacgcatatacgaccaagactgcggctgcattgatcgtcagcgcgaggccaagcggaacgaagagtgggacgactga

SEQ ID NO: 536900 - DNA, 957 bp, Stenotrophomonas maltophilia
atgcatctggtggaaacgatggcctatgccggcgagaagccctggcatggccttggcaacaagctggccccgcagcagcccatcgaggtgtggcggcagcaggccgggatggactggaagatcgaggagtcggaagtccgctacatcacgggcaacaacaacctgggtgtcatcaacgcctttccggagcagaaggtgctgtaccgctcggatacccgttcgccgctggcggtggtgagcaagcgcttcaaggtggtgcagccgggcgagatcctggagttctaccgtgacctgaccagccagagcgggttcgagctcgaaaccgcaggcgtgctgcgcgaagggcgcaagttctgggcgctggcccgcaccggccagagcacgacgctcaaaggccgggacaaggtggatggctacctgctgttggccacggcctgcgacgggacgttggcgaccacggcgcagttcacctcggttcgggtggtctgcaacaacaccctgcgggtggcgctgggcaacaacaacggggcggtgaaggtgccgcatcgcagcgagttcgatcccgaggcggtcaagcggcagctggggatcacggtggcgtcctgggatggcttcgtggcgcggatgaaggcgctggtggagcggccggtggatccggatacggtcgaagggctgctgcgccgggtgctgacctacgccgcgcccgatgggcgtcccgacatcgtcaacgaacaggcgctggccaatgtccgcgcgctgtacgagggcggcgggcgtggggcgatgctgccttccagccgcggcacggcctgggggctgctgaacagcgtcaccgagttcgtcgatcaccatcggcgcgcgcgcagcgacgaccaccggcgtgatgccgcctggttcgggcaaggggcgcagctcaagcagcgggcgtgggacgaggcgatgaagctggtggcgtaa

SEQ ID NO: 536901 - DNA, 378 bp, Stenotrophomonas maltophilia
atgagcagcctgccaccgccgcaacgcccggccgcagggccgggcaacctcgctgacgttgtgccggatccgctggacatcgcctacatcgccatcggtgccagacaggccctcgcagagtggcgcgatggcccgccagcgcccttcccgctcgaaggggagcttgcctacatcgaggcatgcatcgagcaggcccccgccttgcaacgcgcctgggaggctgtccaggaccgctgggactttgtctggtgctacgaggtggctgagcccttcggcctggcctacggcaggcacctgttgcaaggcggcggcccggacgccgccgccggattgctgcatgacctcgtgggcgatgcgttgctcccgccctccgcctga

SEQ ID NO: 536902 - DNA, 996 bp, Stenotrophomonas maltophilia
atgaagaagcaaagcgctctgcgcttggtcgatacccgcaccatggaccgcgagcaatggctggaagtccgcaagggcggcattggcagctcggatgccgccgccgccgtgggcctgtgcccgtacaagagccagctcgagctgtggatggagaagaccggcaggacaccgaccgaagcggccccacccggaatggacgacccgcgctactggggcacgctgctggagccgtatgtggccgtggcctattcacagaagaccgaccgcaaggtgcggcgctgcaatgccgtgctccagcatccgacgttcccgttcatgctggcgaacatcgaccgggagatcgtcggggatcccgaggtcaaggtgctcgagtgcaagaccgcgggtgagttcggctcgcgcctgtggaaggagggtgtgcccgagtacatccagctgcaggtgcagcaccagctggccgtcaccgggcatgcggcagcggacgtggccgtcctgctgtgcggccaggcgctggagatccaccgcatccagcgggacgaggatctgatcgcccgcctgatcctgctggagtgccggttctgggagtacgtcaccagcgacatcccgccgccagccgatggcagcgactcggcaggccgtgcgctgcggcagctgttcgttggcaacgacaccagcctggacttcaccgggaacgcggagctgtgcgctgcgttcgatgcactggccgagctcaagggcgagctggaagtgcgtgagcaggaggccgaacgcctgaagcagaccctgcaacaggcgatgggagatgcctccagggcgctgttcgccaatggggccatcacctatcgacgcacgaaggactcgcaggtgctggataccaagcaactggcagccgatcacccggcgctcgcctcccgctacaccaccacgcgacccggtgccaggcggttcctgctggcccaacacacacaagacgatgcaaggagaacgacatgctga

SEQ ID NO: 536903 - DNA, 897 bp, Stenotrophomonas maltophilia
atgctgaagggcttggcgattaccccgcccgtggtcgggcggatctcgattggccgggtggtggagcgcaatggcaaacgcctgccggagaaggacgaccagttcaccctgaccagccaggtgcagaaccgcgaaggttgggtgctgcacccgctggatgagaccctgcgcaaggacgcggggggcaagctgcgggcgattccggtgcggctgctgttcaacgacccggccctgaacctgcgggccgactactcgctgttcgacaggacgaccggcaggccggtctgcgtgggaaatggcgagagctgccggcggatgacgcagtccggggtcgagtccttgccttgcccggggccgcaggaatgcgcgttttcgaacggggagtgcaaggcctatgcgcggctcaacgtcctgatcggcgatggcgaggaggatgcgctgggcagcttcgtgctgcgcaccacgtctttcaacactatccgcacgctggcggcacggatggcctactacagcgcgctgtccggcggccagatggccagcctgccgctggagctcaagctgcggggcaagtcgaccacgatgagctaccgggcaccgatctactacgtggatctggtgctgcggacaggcttcacgctcgagaccgccattgccgaagcacgcaagcgcgccgagcgccgaaccgaggtcgggatcgatctggtggccatggaagcagcggctcggcagggatttgccaacggtgcgttcgaggatctggaggaggacgtgcccgcggtggtcgaggagttcttcccggaagccaccgtgacgccggggccgatggctgtgcccagtggcctgaagggcaagctggaagcgaaggtcgggcagatgcccaaggagtcggcggcatga

SEQ ID NO: 536904 - DNA, 324 bp, Stenotrophomonas maltophilia
atgagtcgcaggcgccacctgcccccaccggcattgctggaaatcgacgagcagacgttctgggagaagtatcgccccattgtcgagccgaccgaggagcaagccattcgtgacccggaacaggtcgccaacctgatggcgaccacgctctggacggtcgtggataccggcgagtcggaaaccctgtacgcgctgccgggatgccacgtggtcaaccggttgggctacgcggtgacagagcggccatggccgcacaggagcgtggtggcggtctacagccaaggcgtagcgcagggggagcggcaagacgggcgaggcacgtag

SEQ ID NO: 536905 - DNA, 489 bp, Stenotrophomonas maltophilia
atggaacaagcagcagcgctgtatgtgaggagccccacggggcgctacgcccgcgcggagcccgaaaccgtgctggccaccgcgcgccagatcgtcggcgtccggatgcaacgtggcgagatgttcaccgacccgcaggtggtgtgccgctacttccaggacaagctggcgggacaggagcgggaggtgtttgccgccgcaatgctggacacccggcaccggctcatcagctacgtcgagctgttctacggctccatcgatggcgcggaagtgcatccgcgcgaactggtgaagcaggccctgcggagcaacgctgcggccgtgatcgtggcccacaaccatccgtcaggtgatgtgacgccctctgcggcagatcgggcggtcaccgaacggctcaagcaggccctgcggctggtggacatccgtctgctggaccacgtcatcgtcggtgggcgggacatcgccagcatggcggcgatggggtggtga

SEQ ID NO: 536906 - DNA, 312 bp, Stenotrophomonas maltophilia
atggcaagcaacaaccacatccccatcgattccagcaacgaaggcctgtgttcggctcgcgagacgcagtcggtcccgccccccacctggagtcccgccagtccgaacctgcgcttcaaggaactgctcagattcatgcgggtcagcaagtcgaaggcttacgagctgatcaagaaggatccgaactttccgaagggcatcccgctgtacgacggcgagcgttcgcccaaggtgtatcgcgtcagcgacgcattggcgtggatcgaaatgcgcagcagcaagcaccgccacaacagccccatctccaagtag

SEQ ID NO: 536907 - DNA, 357 bp, Stenotrophomonas maltophilia
atgaacatcatgacgaacgagattggggcaagcgcgaacaccgcgctcgaaatgttggcgatcgcgcttcaggaggagatcgcttccggcaagaacaagagggctatcgacttcaaggaggcctatccgctgatcgaacagcatctggccaacaacggctcgcagaagaccgcatgcgacaagttcaacgcagtctatggctacaaactgcaccagccgcagttccgcaagatgttgaatgcggagcgcatgagccgcgaagccagcggcgatggcgtcaggtgcatccactgcaacacaccgctgcattcggccactgtcggaactgagcctgactacaacacggaggccgagtga

SEQ ID NO: 536908 - DNA, 1455 bp, Stenotrophomonas maltophilia
atgaacgctatgaaccggatgccttttgtgcccgctccgtaccccctggatgcgtttctggtgctcgtccgcgaggctggtcacgagttgattcgcaatgtacaagctccggatgcgatggtgggcatggcgctgatcaatgctgtttccatggcctgccagagcttgatcgacgtgaaactgccgacgggacagattcggcccgtgtcgcagaacctgctgctcgtcgccgaatccggtgagcgcaagtcgactgtggattcgcttctgctcgcaccgttccgtgaatccgataagaaggcaatcgccgcccatacttacaagatcacggcatatcaagcagaactcgttacatggggggcaaagaataagggattgcgtcgcgcgatcagcagggccagtagcagaagcgaagacaccgccacactggaaatggagctggtcgagcatacgaagttggtgccccaaaagccgcggctgcgctacttcctacgccaagacatcaccggcaaggcgatcatggaagcattgcagggcagtaacgagtcaatcgccattaccaccgacgaaggccaaatgttgttccagagctacgcgatggcgcatgtcggcttgctcaaccggttgtgggattcgccggaggtgctgccattggatcgtgctggtaaagacccgattctggctatgaatcctcgtgtgtcggtcagcatcatgacgcagaaggcgccgctgcaggcctacttggaaagtcgaggatctgtggcgaaaggatccggccactgggcgcgctatctggtgggttggccggcatcgactcagggttttcgctgggtgaacccgagcgaacagcgatgggagcatctccctatcttccacgcccggatcagggaactcattcacaagcaccagaccatgagggagtcgggcacgatcacacgtgaactgattgagttctcggacgatgcaaaggcgcgttggttcgcccttgctgcagaaactgaagtcttgctgcgcgaaggccattaccttagcgacatcaatgactttgcatcaaaagtgatggagatccttgcgcgtctcgctgcgtcgttgcactacttcggcggcgaggggggcaagatcaccctcgacactctggagcgcgccttcacgatcattcgctggcacgtcgaggaatacaagcatctgttctcgccccagttcgtggttcctcaggatcagaccgatgcacaggcgatcgtgaactacctgcggtcgcacctctggtgcggcccaacgtctgacacctttgtgccaaagaaccacgtgcggcgcaatggcccagtccgcgacaagacgcgcttgaacgccgccctggagctgctcgcagcaaggggggccgtggaggtcggtgttgcgccgaaggataagaaaacgtacatccggttgatgaaccactttttcggcagcatgtag

SEQ ID NO: 536909 - DNA, 603 bp, Stenotrophomonas maltophilia
atgccggactgggcacagggcaatccgggctacttctggagcatggcagacaggttcgagcgcgccaacggcgcagcttatcgtgaacacgagatcgcgctgcctaatgagcttactgctgcgcaaatgatcgatcttgcggagcagctagttcgaaatctggtcgggaacaagccttaccagtatgcgattcatgcacctgaaggcagcatcggtagaatccagaacccgcacatccatctgatgtactcggacagggtgcctgacgggatcagccgggcacctcagcaaatgttttcgcgattcaacgcgaaacagccggagagcggagggtgtcgtaaggacagcgggggcaagacacctctgcagctgaggcaagaggtcacagaaactcgcaagatggtcgctgatacccagaaccaggtgctggcagcccatggccatgaggcccgtctcgatcatcgtagcttgcgcgagcggggcatcgaacgggttgccgaacgacatctggggtcgcatttcattgaagggatggccgactctgagaaggcggtgtacgcccttcatcgaagcagtgagccggggcgcggaacgccgtcttag

SEQ ID NO: 536910 - DNA, 1422 bp, Stenotrophomonas maltophilia
atggcggtaaagatcaaggataaggctaaggtaaatgaaggccacgtttcccgcttcaattacacaagaaaagatagtgtcggaactattgaggagctaatcgaagagctgaatatcgagtgtccgaaaattaacggcgagagaatccagatggaatccctcgctggtgcaatcagcttcattgagaggacgacggggcatcggattggtgatcaatatgaaaagctgcccattgcgactattaagctcataaagctcctgtacgttgaaaacgaaaagagtggaatgcatctcttcaggctgctttcgtcgcccggcgagttgagcaaaccaacgatggagtttagtacaggaaccaccatctctcgtgacatcagcacggcaaacctggttgattccatcgcaagcacactgtctctggagattgcagaagacaagctcgagctgttcaggagactgattggtgacgatgcgcatatgagctccagcgaaaagctacttcgccatatcgaacgagccaatgatgtcatctggcgcgtttttacggatcggattgtagacgacgatctcggaatggcggacgcctaccgcgccctttccagatatatggactcacatcatgttcgaggagtcccaggcgcagttactcctttgaatgaagctgtttttgttcatatcgaaacgcttgcccttcagcactttatcttgcatcacaaggagcatcttgaaaggattcgaatcgagggaaagatcggttcaatcacaagtgatctttttcggttctgcgaaacgcttgctgtggagtctggggtgcctgaggtggatccatttgacggaatatattccgttaaaaacttccatcatgtagtcttggcatacccatctgagtttacatctttggtcaaggctgcaacgggtcttgatacaagaaagaggcgattgttcgagaacactgttagggcgagagcgatccttgtttcccacgcctatcgatcgtttgacgaagctgatccagaggcgccggtgatttctcttatagatattgttgcggcactttgttcttttcgagtccagcaggaaatcaaaacgcagtactcgccatactggcacggccagaagagtcaaggcgctgatccacagagattgttcgacaaggggctaagggtacgtgaccctcatcagcatcaaggtgtattccagatctactactatcggttcttggaatacagagaggaattctctggtacgtcttcaagccataacgcgtggatggcattccagctatcacgcctggatgcctatctacgcatagttcgacttaacggcatcatcaggatatttgcagcatcatcagctttcgattatctctgtatggagaaggcaatggagatagctatgaactacccgggtaaccatcagtaa

SEQ ID NO: 536911 - DNA, 3054 bp, Stenotrophomonas maltophilia
atgaagttgaagttcaagacccaggcctaccagaccgccgcggtgcaggccgtggtggattgtttcaagggccagccgcccgccagcaaggaagcggccagctaccggcttgacccaggcaaagcgaagaaaggcgtggaagacctgtacgctggtgcgggcttccgcaatgccgaactgcagatcagcgaagccgccgtgctggagaacatccaggccgtgcagcgcggacagaacctgccgatctccgaggcgctggtgaagaccaaggtggcccgattcaacctcgacgttgaaatggaaaccggcaccggcaagacctacgtttacatcaagaccattttcgaactgaacaagctgtacggctggagcaagttcatcatcgtggtgccctccatcgccatccgcgagggcgtacacaagtccctgcagatcaccgccgaccactttctggaaagctacggcaagaaggcgcggttcttcatctacaactccaagcagctgcaccagctggaaagcttctcgtccgatgccggcatcaacgtcatggtcatcaacgtgcaggccttcaatgccaccggcaaggacaaccggcgcatctacgaagcgctggacgacttccagtcgcgcaagccgatcgatgtcatcagcgccaaccagcccatcctgatcctggacgagccgcagaagatggaaggcggcaagaccctggactcgctggtcaacttcaagccgctggcggtactgcgctactccgccacccacaagaccacccacaacaaggtgcatcggctggatgcgctggacgcctacaaccagaagctggtcaagaagatcgccgtgcgcggcatctcggtgaaggggctggcgggcaccaatgcctatctgtacctgcaatccatcgacatctcgccgaaaaagccaccacaggcccgcgtcgagttcgagcagaagctcaagggcggcgagatcaagcgcatcgtgcgcaagttgaagaaaggcgacaacctgttcgacctgtccaacgagctggatcagtacaagggcttcgtcgtctccgacatcaatgccatttccgacaccctgagcttcaccaacggcgtcgatctgaacgttggcgatgcctccggcgacgtgaacgaggctgcgctgcgccgcatccagatccgggaaaccatcaaggcccacttcgacaaggagcaggcgctgttcgcacaaggcatcaaggtgctgagcctgttcttcatcgacgaggtcgccaagtaccgcgactatgcgcaagccgacgagaagggcgagtacgcccggatcttcgaggaggaatacaacgagtacctcaacgaagtgctggagctggaagaatcgccgtacacgaaatacctgaaaggcatcgcgaccgaaaagacccacaacggctatttctccatcgacaagaagagcaagcgcctcaccgacccggacatcgccaaacgaggtgagaacgccgggctttccgatgatgtggatgcctacgacttaatcctcaaggacaaggaaaagctcctgtccttcgacgagcctacgcgctttatcttttcccactcggcgctgcgcgaaggctgggacaaccccaacgtgttcgtgatctgcacgctcaagcacagcgacaacacagtctcgcgccgtcaggaagtggggcgtggcctgcgcctggcggtgaaccagcacggcgagcggatggatcacccggcgaccgtgcatgacatcaacctgctcaccgtggttgcaagcgaaagctacaaggacttcgttgccgctctgcagaaggacatcagcgaatccctgtcttcgcgtccgcgcaaggccgaccaggattacttcactggcaaggttctgaaaacggccgggggcgatgtcaccgtcacgcctcagatggcgaagcagatctacaagttcctgctcaagaacgactacaccgacgacaacgaccgcatcagcgaggcctatcaccaggccaagcaggagggaacgttggccgaactgccggcagaactcaaggagtacgcagagcaagtgttcgcgctggtggacagcgtcttcagcgataggcagctaccggaagttggcgacgaccgcaagccgaagaagaacccgctcaacgacaacatcaacaagcaggaattcaaagagctgtggcaccggatcaatcgcaaggctgcatatagcgttgccttcgactcggacgagcttgtcaaaaaggcggtcgccgctatcaatgccaaggatgcgggactgcgcgtgacaccactgcagtacaccgtcgaacgtgggcagcaggccgatgagatcagcttcgacgcaatgaaatccggcgacggcttccgtgttggcgaaacccgcaccgaaaagtacaaacaatcggtgcaatccgccgttcgctatgacctgatcggcaagatcgccgaaggcgcgcagctcacccgtcgcacggtggctgcaatcctgaaagccatcaacgctgcagtgttcgcccagttcaaaaccaacccggagagcttcattgccgaggccatccgcttcatcaatgagcagaaagctacggtcatcatcgagcacctggcctataacccgattgatgacagttatggtctcgacatcttcacggacgggcagatcaaacaggacttcagcaaggccggggacaagctgaggcaccacatctacgactatgtcgtgaccgactccaacgtcgagcgccagttcgtgcaggagctggatgtcagcagcgatgtcgtggtctatgccaagctgccgaagggattcttcatccctaccccggtcggcaactacaacccggactgggcgatcagcttcaaggccggcgcggtcaagcacatctatttcgtggccgagaccaaggggagcatgtccagcatggccctgcgccccatcgaagacatgaagatcgagtgcgcccgtaagttcttcgctgagatgaacgagcgcttctctgccgagaatgttcgctatgacgtggtaaacagcttcggtaagctgatggaagtggttaagtga

SEQ ID NO: 536912 - DNA, 1872 bp, Stenotrophomonas maltophilia
atggacaagctgaagatgcactcccccgacctgaccgccgccaacatcgcgcgcatccgcgacctgttccccggctgcgtgacggaggcccagggcgaagatggggaagtgaagctggcggtggatttcgacctgctgcggcaggagttgtcgacatcgttggtggaggggccgcaggagcggtatcacctggattggccgggcaagcgcgaggcgctgctcacggccaatgcgccgattgccaagaccttgcgcccggcgcgggatgagagtgtggacttcgataccacgaagaacctgttcatcgaaggcgacaacctggatgcgttgaagctgttgcaggaaacgtatctgggcaaggtgaaaatgatctacatcgatccgccttacaacacgggcaacgatttcatctatgaggatgactttgcggagaacgcggacgagtacctgcgacgctcgaatcaggtggacgaggaagggatttccctaacatggaactccgaaagcaatggaagatttcattccgactggatttcgatgatctactctcgaatccgtatcgcaagaatcttactgaaagacgacggctcaattttcatatcgattgacgaaaaggaagttgccaaccttcgcaaggtttgtgatgaggtgtttggcgcatcgaatttcgttgccaacatcgtttggcaatcacgcacatccatttcagacgaccatgaaatatctctaaatcataatcacacactaatttacgccaaagacaagggatctctccacttctacggcgaagaactcaactcatccgaatatcaaaacagagatgacgatccgcgtggcccgtggaagctggttcctcttgatgcgaacaagccgggcggcaatacgatgtatccaatactcaatccttcgacaggggaagagcactttccccctgatgggcgtagttgggccatcaatccaagtgaatacaagaagcttttcgatgatggaagaattgccttcggaataggaggcgattccgccccaaaaagaaaactgtttttgaaagaacgcatcgaacgcggtgacacaaagacaccaagttccatcctgctcgacgctgggacaaccaaggatggttccgcagaggtcgccgacattctgggaaagaaaaaaatcttcagctatccgaagcctaccagttttctgaagagactcgttcgatacggggtttatcacgagaaaaacccgatcatcctcgatttcttcgcgggatcttcgaccatggctcatgccgtaatgcagctcaacgctgaagaccaaggcaaccgccgtttcatcatggtgcaactgccggagccatgcccggaagattccgaggcgttcaaggcgggctacaacaccatcgccgacatcagcaaggagcgcatccgtcgtgcgggcaagaaaatttccgatgacttggtaaacggtagtgtggacaccggctttcgcgtcctgaaagtggcgacatccaacatggctgacgtgttctacagcccggacgccaccacgcaggacgacctcctcgcctccatcgacaacatcaagcctgaccgcaccccggaagacctgctgttccaggtcatgctggactggggcgttgatctggccctgcccatcgaaacgaaaaccatcgccggcaaggacgtgttcttcgtggacaccgatgcgctggcctgctgcttcgatgccgatggcggtatcgacgatgccttcatcaaggatctggccaagaccaagcccctgcgcgccgtgttccgcgatgccggcttcaagaacgacgcggccaggatcaatgccgaacagatcttcaagcagctttcgcccggcaccgacgtgaagacgctctga

SEQ ID NO: 536913 - DNA, 1659 bp, Stenotrophomonas maltophilia
atgccctcacatgacctcacggccctgctgcaggaactcatcaccacctgggaaaacgaggtggtggagttcaagcaggccaccgatgcctacggcaccgacgacatcggcaagtatttttccgcgctggcgaacgaagccaacctgcgcggggtcgagcgcggctggctggtgttcggtgtcaacaacaaaacccgtaccatcgtcggcaccgactaccgcacgcaaaaggatcgcctgcaaagcctcaagcagcagatcgctgccgatgccgagccgcgcatcaccttccgcgaaatccatgaattgcagcatgaacatggccgcgtgttgctgttcgaggttcctgccgcaccgctgggcatgccgatcgcctggaagggccactactacgcccgcgccggggaaagcctgagcccgctgggcctggacaagctggatgagatccgtggccagacgctctcgcaggactggaccgcgcaagtggtacctgctgccacgctggccgacctggatgaaaccgccgtggccaaggcgcgtgagtccttcgcccggaaatacgccaaccgcatcgacctgccggaggtgatgggctggccgctgtccaccttcctggatcgtacccgcctgacgcaaggcgggcagatcacccgcaccaccttgctgctgcttggcaaggcagaggctgcttacctgctgtcgccgcatccggcgcaaatgacctggagtctggagggcagcgaacgcgcttaccaacacttcggcctgccgttcctgctcaccacctcgtcgctttaccagcgcatccgcaacatccagctgcgcatcctgccgcagaacgagctggtaccggtggaagtgccgaagtacgaccagaagatcgtgctggaagccttgcacaactgcattgcgcatcaggactatcggcgcaacggtcgggtggtggtgaaggagcagcctgaccggctggtgttcgagaaccagggcagcttcttcgaggggaagccggatgattacgtcgcgggccacaagaccccgcatcgctaccgcaatccgttcctcgtccaggcgatggtcgagctgaacatgatcgatacgatgggctacggcatccgtgacatgtatctgggccaagcccgccgctatttccccatgcccgactacgacctgagcgagccgggcgaagtgaggatgacgctctacggcggggtggtggacatcgcctattcgcgcctgctgatccagaagaccgacctgccgctggccgacgtgctggcgctggaccgggtgcagaagaagctgccgatccccgatgccgccgccacccgcctgcgcaaggccgggttgatcgaaggacgcaagccgaactacttcgtgtcggcggagattgccgcggccacggccagcaaggcagactacatccgcacgcgcgctttcgacgatgagcattacaccaagctgctgaccgaatacctgaagaagtaccagcgcgccaatcgcgccgagatcaaccagctgctgctggacaagctcagcgatgcactcaccgaggaacagaaggtcaagaagatcgacaacctgctgaccaagctccgccgcgtgggccgcatccacaacgccggaagccgtggccagccggcttgggcgcttgcagaatga

SEQ ID NO: 536914 - DNA, 2946 bp, Stenotrophomonas maltophilia
atgatggacaccaaggtcaacaacgagcccaacagtctttcaactgtgacggactacgccgcggcgatccagcatgtcagttccggccagtttaccagcaggttcagcgagggcgggcaacgctacttcgcgtcgatctttggcgctccactttttgctttatccaggtttgcgccagaagcttttgcttcaaacgacaataacctcctcgtcatctcgtctgatccttcccatgcagcggacggtggacgctggtggtccctctacgcgaaaacccacgggccaagcaaattcaacctgacgatctgctttccacacaagcctccgggcgggaaagctcccaagccactcctgttccagccgccacagcaggtggtcaagaactggcaaaagcatcttcaagcctcgagtacaccgcctgatgtggtggtgttctatccgaaggatttcgatgaactcgaaaccaccgccagcgagctcatcctctacgccgccgggagcaaggtcctggtgtcctgctacacccgtctggacagcctgattgcccgctgcatgctggcttcccgcggctacaagaccagcgccatcattggcttccattttacagaagatgagccgcagctttttgcttcgggcgcatggtggttctctgccatcgcgcccacccatgggaacagcttgtccccggatatcgagcttgtcgaaaagcttcggatggcaaatctccagttgactcggctcttcctgcaaaccgataacagggaagacaaagaggtcctcgccagcattgttgccacccgcgccagcgacatcgtggacggcgaggacatagaaacggtcaggctctctaatagcagcgggatcgatcttgcatctggccgtttcttcaaaatgaatgaagatggcgagggcgagcacttcatctgggatgacacggtgatgagcgccgatttgctggcgctgcagcctccagccaatttggaaaccgcggaagacgaggatcgcctggcgctactactctggatcagtcacgcagcagcacaggaagccaagcgtgaactgaacgtattgacgggcaacggggctgtcccgccggaaattagcgggagtgcagtaccgtccgaatcatcaattgccgtggctgtagagagcccgtctgcttctgcatcggcgattgaagcagcatcaactgccgagatttccgaagccttcacgaccgaacctgcggcagccaccacgccggcctccacgcccgagccagtcgaaaccgaagccacctcagttgacacgaaggtcttcagccgcaaccgctcccgactctcgcgcagcgctggcacggtcaacgtactggcgctggctgcaatgcttggcagggagggtgaagcgacgaccacctcctacgatgccgccaagacccaaatcctcacctggctgcgtgacagtgacttcatcctcgaacatcccgatgagaacagccacgtcgaatcgcccgccggtgaagtgaccgtcgagaccgatgggcaatccatttgggcgatgcgcttcgacaaccgcagcacgatggaaaccggcgcgatctggcgtgtggaagccactctgatcggacagcccgtacctgccatcagcttgcgcctgatccaggtgcgcagcagcgaagaggccccgccgcccgtcatcagtggtgttccacgtctcatcgtcaatattgccgatcgggtcggcttgcaggatgccggcgaggcgctccgcaataccgccctgcacctgaagcgcgagggcgacaacacaccactggcacgcttgctactcaatccacaccgcacccagccggtcatcgtcatttccggcgaagtggatgcttcggcggatcgtcttgccaagcgcctgacgggcgttgcgcatgtcgtctgcatcgacaatgccacatccaaccagatgattcgcgcattcggacgcgaacgctcggtgttcggcaatgcgatacgcctgtatcgcccaggtttcagcgccactgccaatccctaccagcatccgacttgggccttgaaaggctcacagctgccgaaatggctggccaacaatattttcgaggaagcttgcgccatcagccttgaggctgacgacctggatgaccgcgcaccctcgttccaatccgtgcgcaatctactggccaccaagcgcatggcttcgtcggaacggcgcatttccgagctgcgacagcaggcggaaaaggcggcctccagtaaggatgagaaaatccgccagcttcaggaggttcgcgatgagcaggacgccgtgctcggcatgtaccgcgatgaaagcgacaagctgaccaaacagaacgaacagctaaaacgcgatttgcaggcggcgttgctggaacgcgacacggcagcggaagaagttcgtcagttgaactatcgaatcaacaacaagtgggcggatgaagttgcaccggagacaagcctctcggatgaaagctattacccggataactgggacgagctagaagaatgggttgattcctacggcgaaggcaaactcgtacttcacgaaaaggcgctcaaggccgtgaagtcatctccgttcaaggacatcccgtttgcctacaaggcactcgagtatctggtccgctatttcgttcccatgaagcaacgcgacccgaaggatgacgcgcccttccatgccgaaatcactgcgctcgccgaacttgggctggagcgcgaacctgtaggcgaggcgctgaacaaccaccgctacaaacagtcatatcgccggctctacgaagggaagacaatttggctggatgaccacctcaaatggggtgtcggcttcgacccggctacgctgttccgtctttatttccactatcacgaagccagcggcaaagtaatcgtcggtcacctgaccacgcacttgcccaatagcctcacccatacatcctga

SEQ ID NO: 536915 - DNA, 1704 bp, Stenotrophomonas maltophilia
atggaaaatacggcagcacatatcattcttgccaacctgcgagagaggatcgaaatcgacagtgatggtaagtaccggctttccggggtcatcacccagaaggagctggatgcgctcgaacatttcatcaccggtcaggcatctccgccttccgaaggtgcagtggttaaagccccgcccgttgcgccggtgccagcgcccaccgtgaaggccaccgtgattccggaaccggaacccgaggtcacgctcaatttgtccacgctggagctggcagacagcgacattagctatcgtgtttgcctggacttcggaacggccatgtctaaggccaccttcgtccatgacgatgacgagctggaagacatccaggtattgcagcttggtgttcccggcgaccaagaaaacatcgatatgcacatgcttgtgtcttcggtattcatagataccgatggcctgctctggttcggtcagaaggcggtggaacattcacttgccgcgatcgagggagaccatgcgcgcatggacaacatcaagcgcgccctgtcggaaggcaatcttgccgagcctgtggattcaaggttcaatccgaccacttaccagttgacctacgaagacatcgtactggcctatctggcgttcttcacctggacaatcaattacgccctgtcgcacgacgtggattccgtcgagattgcccccaattttcgccggcgtttcgccatgccctgtttccctcgggcaaatgcgcggatggtggaagcaaagctcaagtcgctgctcggagaggcacaagtactggcggatacctttggtgaggacatccaccagggccttccgctatcccatttcctattggcactcaagcagctgagacaagtcagatctgcgtattcctttatcgacggcagcgttaccgaaccactgggcgtggcaggctccctgctcagttggcgtactgaagaagactcgcttgctctggtagtggacatcggcgccggtaccagcgacttcagcctgtatcgcttgaagttatcgatcgacgacgatggcaatatcaagtcggcagcgggcgaagtggacgggaccgcgcgcgggattactgaggccggaaaccatctggacaagatcctgatggctttcattctcagcaaggctggcgtggacgcatcgcatccaaagagggtgaacatcacccacgacctggatcgagaaatccgcaaccacaaggaatcgttgttcaatacaggctctgtcctcgtgacgctctataccggcgaggaagtggatgtttcgctcgatgagttcatggcactcgatgcgatcaaagccttcgaggacgtgctgagatcgaccttggtggcgatcttgcaggatgctgattccgaatgggtcaattgggtgcgttatgacccacgccatcgcttgaccatcgcgctcactggcggaggagcaaacctgccgatggcgcgaaagctggctgaaagcacggtgactgcccatggcgtgaccattcccgttgccgccgctaagtccttcccggaatggttgcgcaaggactaccccgagctggaagaaccctatccgcgaattgcggtatcgcttggaggcgcccgccaaaacacgttccgctcgatgggcgtgctgaaaaccaccggcttgggtacaggccacacccttgaacgatttccgacccaaggcaactga

SEQ ID NO: 536916 - DNA, 2166 bp, Stenotrophomonas maltophilia
gtgagcagtggcaaggcatctccggcactgatcgcatggcctgccaaagcagccgtcaatcgtgtcgttcccaagaccaagttctacgaacatgcggcggtgaattcgcggctgaaagacttgttcgtgaaggaagtcgagcagatcacctggctcgccaagctggcgacggagacgatcaatctcccagccaaggacggcgtgtcggaaatccaggttttcggcatccagctcaagaccccggagctgcatcaggacgtgttgcgctgcattgacggggcgatccaccacccgatcctgttcgagctgcaccatgatggccgcgtgcaggtcattgccagcttcaagcgccctcgcggcggcgatgtcacgggcaagcagctgctctcggagtatttcgccacgccatggtcgcccgtggacagcgggcgtaccgaccttccgacggcactgaacctgggcgtcctttacgaacgcctgctgctgcgcctgattcccctgcctgcacgtcccaatgagccgttgcgcgccctgattgagcgttttgacaagattcgagccacaaagcgcgaactggacaagatcgtctcagctcttgagaaagaaaaacagttcaatcgcaagattgagctcaatgccactgtgcggaagctgcgcattcagctggatcatctgggctaccgcaagctggatccaacgtttaagaccaatgagttgcccactatgaatgcccctgctgaagttacggtcaaccagatcctcgaggcagcagacctgaaagccctcaatggcctgcttactcaggccatgaagcaacagcagcatcaggcgttgctaaaagataagcagttgggtcaggtggtcgaagccgtggtcaacctaacggagactgcgcctagcggagaagaactcttcgctgctgcaattctggggcgattggcggccgtcgcgcgaggccgagaatcggaagtctattcccgcgtgagcgaaattttctctgaggaaccagccagtatcgagacgttgtccgacggcgatgaaaaggaatacgccgccaaggccttagcttatacagatgagtcatggcttctggcgtattgcgctcgcgaggcgcttgcgattgataccgcaaacaatgcccgcaaggaattgctgcgcatcttgctggaaaagagtgagagccttgccgacggcatccgcaagctcactgatgctcaagccactctcaaggccatcgaatccgcagacacccgcatcaagcgcgtgcgtcgcatcttcgagtctctgaccgaagtcgcccgcaactatgatggtgatgtggggcaagaacccggctcagcactctctgcctgcgtacaatccttcttgcgcggcgcgactgatgccgacaccgaagcactctatgccagcatcgaagcctcatttggcactctggttcgcctgatcgagttgcgcttttcgcatgccctgcacgctgaaacctaccagctcctgcgagacgggagaaaactgctttcttctggatcttgggcgcgcctcattgaatcctcgatcttaattcaaaaagttcaagtcaatctgctcgaagctgcactcgttctcgcccgccagaaccgcaccgacaaagaaatactcaagacaatggaagccagttggccttccactgccgatatctcgcgcgatctcaaaaagcacttcaagggtgccgttgacatctctccagacgtggccgattactggatgaagttggggcgtgttactgaaagcgagcgcgccgccgaacacaagctgggcaacaatgaagaccagcagatcggcgaattgctgattcagctggatgcgaaccgcgacatcatggacaagctcaatcgcgccattgttcccatcttgaaaatctccgacccgtaccaggccccgacggtggaacgcgcaacgaaggggtacgagagcatcgcccgggttgccgagcgactggcgcggatgcgcaagctcagcaagacagacctactgcacaaggttgtggactacaaccccatcgaacacgacatggaaggcggtcatcgcagcggcgttcgccgggtcaaggtggttcgcgatgggataatgaaagaattcggtggaaaaaagaaaaccttggtcaagccccgcgtggagcctgaggaataa

SEQ ID NO: 536917 - DNA, 3288 bp, Stenotrophomonas maltophilia
atggagatcatcgacaacatcagccacctgctcggcgatgacctcaagcaaagcctccgtcccggagccaggctcaaggtggcggcgtcctgcttctcgatgtatgcctacgaagccctgaaggccgagcttgagcagatcgaagaactggagttcattttcacttcgccgtccttcgtggccgaggagatgacggacaagatccgcaaggagcgccgcgagttccacatccccaagttggaacgcgagcgcagcctgtacggcagcgaattcgagatacagctgcgcaacaagctcacccagcgtgcgattgcccgcgagtgtgcggattggctgcggcgcagggccaggttcaagagcaatcgcagcaagtcacccatgcagcaattcgcatgcgtgcagagtgaggccaacggtgcagccgcagcctacatgcccttgcatggcttcacagctgtcgatctgggctaccagcaaggcaatgcggtatcgaatctggtcaacaagatcgacgagcccagcttcaccgccacctacctgagcctgttcgagcagatctggaacgactcggaaaagctcgaggacgtgaccaagcaggtctgcgatcacatcgacacggtttacaaggaaaactcaccggaaagcatctacttcctgatgctttacaacatcttcaatgaattcctcgatgaggttgacgaggacgttctcccgaacgaccgcaccggttatcaggacaccctgatctggaacaagctcttcaactatcagaaggacgcggccaccggcatcatcaacaagctggagacgtacagcggttgcatccttgccgacagcgtgggcttgggcaagaccttcaccgcattggcggtggtcaagtattacgagctgcgcaacaagtccgtgttggtgctttgtccaaaaaagctagcggacaactggctgacgtatcgccacaacctcaagacgaacattcttgcgcgtgaccggttcaactacgacgtgttgaaccacaccgacctgaaccgcaccagcggtgattcgcatggcatcccgctcaatcggatcaactgggcgaactacgacctggttgtcatcgacgaatcgcacaacttccgcaacaacgatgcggtcaaggaacgagaaacccgctatcagcgcctgatgaatcaggtcatccgtaccggcgtgaagaccaaggtactgatgctttccgctaccccggtcaacaaccgcttcaacgatctgcgcaaccagttggcgctggcctacgagggcgactcggagaacttgagcaagaagctgcgcaccagcaagacggtggaggaggtgttccgcaacgcgcagaaggccttcaacacctggtcgaagttgcctccggaagaacgcacgccccgtgccattctggacgggctagatttcgacttcttcgagctgctggacagcgtgaccatcgcgcgctcacgcaagcacatccagaccttctacgacaccagcgacatcggccaattcccggaacgccgcaagcctctctccttccatcaacccctgtccgagaaagacgggacgatgagcttcaatgacatcttcgctctgcttacccagatcaggatgtcggtctacgcgccagtcagctacatcctgcccagcaggattaagaagtacgaagacatctacgacaccaaggttggcggcaacaagggcacgctgcgccaggctgaccgcgaaaagagcctgcagcggttgatgacggtcaacttgctcaaacggttggaaagctcggtcgaggccttccggctgacgcttgattccctccgcaagaatcacgtccgcaccttggacaagatcgccaacttccgccaggtagaaggtggcagcgtcgaggaccacaccgaagtcctcgatgaactggagggcgacgaagacgatctgccggaagacgaactggaccgcagcatcgaaggcaaggtcaagatcaacttggctgacatggatctgccgcgttggcaattcgacctgaaccaggatctcgagcacatcgaagccttgcttgaggccatgcgtgacatcacgccggaacacgatgccaagttgcaacacctgaaggcacatgttctggaaaagattgccaacccgatcaacgccggcaacaagaaggtgctgatcttcaccgccttcgccgataccgcggactatctctacaggaacctggcgccagccctgacggatctcaagctgcacaccgccaaggtgaccggcaagggtgcgccacagtccacgctgggccgtggctacgacttccaggaattgctcacgttgttctcgccacgctcgaaagacaaagcgctggtgctacccaacgagccaaacgatgtcgaagtgctgatcggtacggattgcatttccgaaggtcagaacctgcaggactgcgactacctcatcaattacgacatccactggaacccggtgcgcatcatccagcgattcggtcgcgtggatcgcatcggttcacccaatcagtgcatccagctggcgaactattggcctgacatctcgctggacgagtacatccgcctcaaagagcgcgtggaaagccgcatgaccctggtggatgtcaccgccaccggagatgacaacgtcctctctgcgcaagcgaacgacatgtcctatcgcaaggagcagttgcggcgtttgcaggaagaagtgatcgaactggaggatttaaagacgggcgtagccatcaccgatcttggcctcaatgacttccgcatggacttgctgaactacgtcaagacccatggcgacctggagagcgcgcccaatggcctgcacgcgattgttgcagccaacccggagcgtggcttgcagccaggcgtcttcttcaccctgcgcaaccgcaatggtgcagtgaatccgcccgcaaacctgccgcaacacaatcgcctgcatccgtactacctgatctacatgggcaacgatggccggaccatccatgaccacaccgaggtcaagcgccttctcgatctggcgcgtacctgctgcaagggtcaatcagaacccatcgctgacctgtgccagaagttcaacaaagccacggcagatggacgcaagatgcagccttactccgagctgctggggaaagccattcgctcgatgatcgaactcaaggaagagaaggatatcgacagcctgttctccggcggcaagaccagcgccctgacccagaccatcagcggactggatgatttcgagctgatctccttcctcgtggtacaggagacagcgtga

SEQ ID NO: 536918 - DNA, 231 bp, Stenotrophomonas maltophilia
atggggacaaccaacctggaaggggaaatcctgacgctggatgaggtcgctgccttcctcaaggccgggaagcgcacggtctatcgctttgcgcagagtggcgagattccggccttcaagcttggtggcacctggcgcttccgccgctcggagctggagcactggatcgaccagaactccaaccagcgcgcacctgccaagccagccacggcgaagaaagggcggcgctga

SEQ ID NO: 536919 - DNA, 1527 bp, Stenotrophomonas maltophilia
atgaactcctcgcccaatctcgaccaactgacagctgagcaactgcgcacactggccgcgcagttgctgacgcaggtcgacgtgatgggcaagaaaatccaccgtgatcaaaccatcattgagcagctcacacacgaaatcgcttggtacaaacggcacaagtttgccaagcgtagcgagcaactgagccctgaccagggtagcttgctggacgacctgctcgacactgacatcgccgccatcgaggcggagctgaaagctgtcaatcccccggttgctccagccgaaccccgccaacagcccaagcgcacaccgctgccggcacaatttccgcgcaccgtgatccgccacgaaccggagaacacccaatgcgcctgcggctgccagctgcaacgcatcggtgaagacatcagcgaaaagctggattacacgccgggcgttttcaccgtcgaacagcatgtgcgtgggaaatgggcctgtcgccagtgcgaaacactgatccaggcccccgtgccggcccaggtgatcgacaagggcatccccaccgccggccttctggctcacgtgatggtggccaaattcgccgaccacttgccgctatatcggcaagagaaaatctttggccgtgccggcctggccatcgctcgctcgacactggcgcagtgggtcggacaaaccggcgtgcagctccagccgctagtcgatgccctgcgcgaagccgtgctgggccaacgcgtgatccacgctgacgaaaccccggtgcaaatgctcgccccaggcgagaagaaaacccatcgggcttacgtctgggcctacagcaccacacccttcgccgatctgaaggccgtggtgtatgacttcagtcccagccgtgccggcgagcatgcgcgcaattttcttggtcagtggaatggcaagctggtctgcgacgacttcgctggctacaaggccagcttcgagcaaggcattaccgaaatcggctgcatggcccacgcccgccgcaagttcttcgatctgcacgctgcaaacaaaagccagttggccgaacaagcactgcacgcgatgggcagcctgtacgaaatcgaacggcaagcacgggacatgagcgatgaagaacgctggcgaatacgacaggaaaaggcttcaccgatcctcgatacactgcatgactggatattggcccagcgtgatcttgtgcccaacggatcggccacggcgaaagccttggattacagccttaaacgctggcaggcactgactcgctatgtcgaggatggtgctgtgcccatcgacaataaccaggtcgagaaccagattcgtccatgggccctggggcgctcgaactggttgtttgccgggtcgctacgcagcggcaaacgcgcggcggcgatcatgagcctgatccagtcggcccgcatgaacgggcatgatccgtatgcctatctcaaggacgtgctgacacgcctgccgacgcaacgggcgagtgaggtcggccaactgctgccgcatcagtgggcgcctgcctga

SEQ ID NO: 536920 - DNA, 297 bp, Stenotrophomonas maltophilia
atggatatgcgcgcgggcactgaaaccgcgttggcccgcgtggtggcggtgttcggtgcggcgaagccgcactgcgcctatctgttcgccaatcgccgcgccaaccgcatgaaagtcctggtgcatgacggcgtgggtatctggctggccgcgcggcgattgaaccagggcaagtttcactggccaggcatccgccacggctcggaagttgaactcgacaccgagcaacatcaggcgttggtactggggctgccctggcagcgggtcggtgcgggcggcgcgatcacagtgctgtag

SEQ ID NO: 536921 - DNA, 1155 bp, Stenotrophomonas maltophilia
atgcctcccgtcccgccccgacccgacgacgccgacaacgtgaccccaccgccgccgaccgacgcggcgcctgcccccacgccggtagaacccgctgtcgcgccgaagtacctcaagcccagcgcgcgcagcgtggtggtgatggtggtggtggccctgctgggcattgcgctgatcctgcgcgcctggcacctgtggccgttcaccagcagcgtgatggtgaccgacaacgcctacgtgcgcggccagatcacggtgatggcgccgcaggtgaacggctacgtgaccgaagtgctggtgaaggatttccagcatgtgacgcagggcgagccgctgctgcgcatcgatgaccgcatctacgcgcagcgtgtcgcccaggcgcaggcgacgctggacagcgcacgcgcggccctggccaactcggaccagtcccaggcgcagaaccgtgcgcagattgcctccgcccgcgccacgttgtcggccgggcaggcggagctgcaacgctcacgcaacgagaccaagcgctacgaggaactggccgcgcagcagctggtatcgatcaacgatcgcgacaagttccgcaccgcgcaggcttcggcgcaggccagcgtgcagcagtcgcaggcgcagatccgcatcgccgaggagaccctggtatcgacccaggtagcgcgcaagagcctggaggcccaggtggagagcgcgcaggcgcagctggaactggcgcgcatcgatctggccaacacggtgatccacgcgccgcgcgacggccagatcagcgaagccagcgtacgcgtgggccagtacgttgccgccggttcgcagctgctgttcctggtacctgacacgctgtgggtggtggccaactacaaggaaggccagacctgggggatggcgatcggccagccggccacgttctcggtggacgcgttccaaggccaggtgctgcggggccgcgtgcaggagatcgcgcccgccaccgggtcggaattcagcgtgctgcgcccggacaatgccagcggcaacttcaccaaggtggtgcagcggctaccggttcggatttcaatcaatgggaatcaggagctggcaaagcagctgcgtcccggcatgtcggtgatcgtgcgggtggatacggcaagcaagcccatggactag

SEQ ID NO: 536922 - DNA, 198 bp, Stenotrophomonas maltophilia
atgtcagaacaggacgatgaaacgttaggtctagacagagcagcgaagatgctgcgacttggcttggaatcgatgaaagagcttgtggacaagggcgcggtgccggccgtgcgactgaaccagaagcacacggtcatactccgtgaggatctgattgacttcttgcggttagaagggcgcaggcaagccgctgagtga

SEQ ID NO: 536923 - DNA, 870 bp, Stenotrophomonas maltophilia
atgaagggcgagggaacggaccgcgcgtccccaaagaaggtctctatcgcgcgcaggagcctcgcagatagcgagctggctaatgcaacaacggttctactccagatcgataccgccaacagtgatcctgataccggacgcttcgccagcgcgcacgcactcggcagagacttcggaagcatcctgttctattgcccggaggcgcgcgatcagaaagacaaaatgagcactcctgtcttctgggctgccttgggtatagtcgaattcaagagacttcaaggttcgaccaataccgatcgccctcacaagtttgctggcgaacggctgcccgagcagatgtattctgtccttgtaactttcgcaaacaggaaagctgaagcaagttgcggaatcgaatgcccattgttgcatttgttcgttctgggagaattcggaccatccccaactttgcaaagtgtcgattgcacggtgcgccttagtctctgcaaaggatacttctggcgtgatcgaggagagaatcatgagtcgctcgttttcctcggcgatatgcctcgctttcgcttcgccctcagcgacggccaacgccgcagcagtggctcgattcgctgcctgtcccaacttaagcgtcatgagtccgagaaaaacagtcgctccgattgccagatacgcgacctcaacggctaccgcagcaactacgacagcccaggcttcccatcttggaacgcagttctgccccaacgaccagcaaggactcaacgcgtcaaggaactccatcttgtgccccatctttccagaaacagtgcgcattctgccacgagttctctcgggcgaacgtatgcactgacgtatagcgactccgagcctgcatga

SEQ ID NO: 536924 - DNA, 360 bp, Stenotrophomonas maltophilia
atggaaccaaaaaacgaagataaatcaacgagcgttgttgactacttcaacaagccagaccttaaaccgtgcccgttctgcggcctacctgggtacgccttccgggatgagcatggcgacttctatgttggctgtggagacagaacaattggttgccatgttgagacctttacgtgggcggtgaaggatctggatgatgctgtggcgatgtggaatcagcgagcagaagaggaccgcattgccaacctcgaagctcagcgtgacaacctgtttaacgagaacaaggcgttgtatcgacaattgattgccatgcagcagatgcttgatgaaaaggcccgaaagaagaaggagcgccactaa

SEQ ID NO: 536925 - DNA, 213 bp, Stenotrophomonas maltophilia
atgagagaaatccagatacccagcggttggaagttggttccgattaagctaacagaagatatggagaatgctgctctacgggagggctactacgagattaacgactacggagactctattttcgtagatggttcgagggaggacgtatgggctgcaatgctgtccgcagcacccacgcctccgccgccgaaggagaccgacgatgctgcctaa

SEQ ID NO: 536926 - DNA, 201 bp, Stenotrophomonas maltophilia
atgatcgccgacaccgagcaggccccgccccgctacgtggtgatgaaggcatccggcagtcggtacgcctacgtcaacgacacccacgaacgccgcacggtgacgcgctgggacatcctgaagccgagcggctgggacaaggctgagctgcagtgcaagcggctcaacgaagagcatgagcgagggcagaccaatggctga

SEQ ID NO: 536927 - DNA, 159 bp, Stenotrophomonas maltophilia
atggaactgtccgaccagctgaaccggcttctcgctgccgccagggcagccatcgagtaccacgagggtgcgcctgccatcgatgaactgcaggccgcctacgaagccctgaccggtgagcgcgtgttcgcctaccgcgacgaagacgcggagggctga

SEQ ID NO: 536928 - DNA, 201 bp, Stenotrophomonas maltophilia
atgaacctcgaaaagatcgacaccagcactacggcggggaaggccgaggtcatgcggcttgcggctgaggggcggagggcttgtgtcagagttcgtgacagcgatccctggtgtgaggtaatggatggaagcgagccatcgtggaattgggctacttgcaagtatgcaattcgcgccgacttcgctggggagaatggctga

SEQ ID NO: 536929 - DNA, 222 bp, Stenotrophomonas maltophilia
atgaacgcattgatgattgcctacctgagcctgtgcgttgtccaccttgctgtggacactgcctgctgcgtgatcgcccgatccccatttcggcctgtggtgatggttgtgaccgccttcctttggcctgtcatgtggcccgccgtgactgtgatggcggctctgatgttgaaggggatgaaggacgctggcctcgttcccgaaagcaagggggtgaagtga

SEQ ID NO: 536930 - DNA, 693 bp, Stenotrophomonas maltophilia
atggacgttcgtgagaagctggcaaggttgaacccgaccaccgtcaagttcgatacgggccatggtggcgttgcggagcttaccaatcaggacattgctgcagccttggcgttcgttcctgctgggcttggccgtgaggtgcttatgtcctgctggtgggcagacggtgcggcgttgagccgggcaaagctgcgcgatgctgttgtggcacttgtggctactgagatgcgcaagcagtggatgcggagggcggaggcccacaccaactacgctctggcagcagcatgtgttggctggtctggggcagtaacggcggagcagcgacaggctcgggatgtggccgaagctaggctgcgcgacgccaatgcagcctgttggccccgggacaccctgaagtatctgcccaacttgtcaaaggtcatcatcgacgaaattgctagtcagcctgtttgctcggaatgcaagggcatgccgttggtggtcgctggcaagacgtgcaagtgtgagaactgcaacgggtcaggtcgggagccaatctctgaccgtggccgggccaaggagcttgggatagatgcggctctgttccgcaggtcgtggaagcgggtctatgagtggatgctggtccggtttcgcgatgcagagacaaccgcagcccagcacttggcggctgcactgcgaagggaggccgcatga

SEQ ID NO: 536931 - DNA, 273 bp, Stenotrophomonas maltophilia
atggcaggacgtccaaaggggctgcccaagactggcggtcgccagaagggcgtgcctaacaagatcaaccgagacctcaaggagatgatccttggggctctcgataaggccgggggcatcgagtacctggtcaagcagtcagctgagaagccggtggcgttccttgccctcgttggccgagtgctgccgatgacagttgcatccgatccagaaaatccactcctgaccggcatcacggtgacctttgtccagcctgagcatccagatacctga

SEQ ID NO: 536932 - DNA, 1272 bp, Stenotrophomonas maltophilia
ttgtccagcctgagcatccagatacctgagaagctcgggtttctgttccagccgtatcgctacaaggtagcccacggcgggcgagggtctggcaagagttggggattcgctcgggcgttgctggtactggcagcccagacgaagctgcgtgtgctgtgtacccgagaggtgcagaagtccatcaaggactcggtgcacaagctgctggccgatcagatcgagtccatggggctcgggtctgtttacacggttgagcaggcccggatctacaacgcgctgggaagtgagttcatcttcgctggcctgagcgatcagacagccgagtccatcaagtcctatgagggcgtggacattgtgtgggtcgaagaggcccgcaacgtatctgaccggtcttggcagatcctgattccgacaatccgaaagctgggttcggagatctgggtgacgttcaacccagagctggatacggacgccacatatgtccggtttgtggcgaatccgccgacgaacggctatgtggttcagatgaaccatgaggacaacccgtggttcaaggacacggagctggtgcaggagcggctggacgaccagcgcacgctcaaggacaccgagtacgcctggaagtggctgggccgctgtaagcccgccattgagggcgcgatctacgccgatgaggtcgctcaggcggtcgagcaggggcgcatcaccaatgtcccctacgacccacgcctaaaggtccacgtgatctttgacctgggctggaacgatgccatgaccatgacacttgcccagcggcaggtgtccgagctgcgggtaatcgagtacatcgaagtcaaccagcgcacgctcgactggtgcagcaacgagctaaagagcaggggctacaactggggttcgctgtggttgccgcacgacggcgagcatggcgactacaagacgggcatgtccgccaagcaaatgatggagcggctggggtgggacgtgcagatcgtcccgaactaccccggagcgcttgaggacggcatccgcaaggcgcgtatggcgctgccccgtacctacttcgaccgcgagaaggcggcgcgcctggtggagtgcctgcggcgctacaggcgcaaccgaccggcatctacgggtgagccgggacgaccggtgcatgacgagttcagccatggcgcagacggctaccgatacctgtccgtgatcgcggaccagctgaccaacgaaacctggggcgcttcggcgctcaactatccgaacctgggaactgcctga

SEQ ID NO: 536933 - DNA, 2028 bp, Stenotrophomonas maltophilia
atgcagatgcgagacgaagacctctgcgcgttgatcgaccgcgaggcgcagaatgccatcggctcggacgactacacctcgttccagcgtgcccgcgccatgtcctactacatgggtgaggctgagggtgaactggccccgcccgaggttcagggccgctccaaggttgtgtccaaggatctgatggacacggtggagtgggcgatgccagcgcttatgcgcatgttcactgccaccgatgacattgtccggtttgagccggaaggccccgaggatgagcgggcgtgcgatgacgccacgaactactgcggctatctcctgttccgcaagaatgagggcttcacggtccttcatgacgccatcaagtcgtgcctgatcacccgcatgggtgtagtcaaggtctactgcgacaagcgctgggaagagaagacggagcggtatgagggcatctcggccttcgaggttgaggcgctgagcgtcgatcctgagatcgagatttcccagatcatcaccatgggcgaggtgccgcaggaggcgctgccgcccgatgccccgctggacgtatcgcagacctactacgtcgaagccaagcgcaagcgcgaggtgatggagttcagggtcgagggctgcccgcccgaagagatcctgatcaacaaggactgccgttcgatcaccgatgtgcggttcatctgccatcgccgtgagatgaccatcagcgacctgctgagccttggctacccgaaggatgaggtagaggcgctgccttccgaccagtctcccaatgcgacatgggagcagcaggagcgccacgactacgatggcagctggacgttcgacaacaccgacccaggtgacccgtcccagcgaaaggtgaccgtcaccgaggcatacctgcgcgtagacgttaacggggacggcatctccgagtaccgccgcgtggtgaaggctggcacgacggtgtttgagaacgaggagaccgacgaccatccgttctcccttttctgtccgatcctgatgccctacaagatcatcggcctgtcgtatcacgacctgaccgaagacctgcagcgcgtcaagacggtcctgacccggcaggttctggacaacgtctatctgtcgaacaaccagcgcaatgtggtgctggaggggcaggtcaatctggatgaccttctcaatccgcgcccgggtggcatcgttcgcaccaagaacctggacgcggtgcgcccgctggaggtgccgttcgtcgccgcagccggtgccgagctgatcaatcagatcgacgccatccgcgatacccgcactggcgtaaccgagatgaactcggccctcaacggcgaagcccttgccaagggcaatgttggctccgaaggtatcgcggccatgatgcaggccggtgtgcagcgcttggaattggtggcccgcgttttggctgagacgggcatcaagaggatctaccagctgctgctgaagaacgtcagccagtacgccaatcggacccagcaggttcggatcaatggccgatggctgcagatggacccgcgtgagtggaagaaccgctacgacatgaccatctcggtgggcatcgggaacatgggcaaggcccagcgtgccgcagccctgatgcagattggcgcggcacaggaaaagctggtcccgaccggcatggtcacgccgcagaatctctacaacaccgcgtctcgactggcgcaggagcttggctatccagactctgaccagttcttcaccgcaccggagccggatgcaacgctcggcggtggggatgaccagggtgagggtgatccgggtcaggcgctcattgctgccgagcaggtcaaggctcaggccagcctgcagaaggcgcagatggacaacgccaccaagctgcaggttgagcgggagaagatcgaatcgcaggagcgggttgcgatgttcaaggcccagcaagaggtcgcactggagcgtgagcgccagcaggcggaagtgacccgcgccgtgtacacgcagcccaacccgcaggaggcggcatga

SEQ ID NO: 536934 - DNA, 279 bp, Stenotrophomonas maltophilia
atgactgacgcgatccgtgatggtcaggaggccgagcgccttctgaaccatcccctgctgctgcaggcctttgaactcatcgagaaggacattcaagaccaatggttgaacagcccggcaagagacgtggacggccgcgaaaagttgcacctgatgaccaagctgctacaccggttgaaggggcagctgcagtcagtggtggagaacggccagatcgttcagcggacgctggagcagtccagagctaccgagatgctgaaccactactcgcagcgctga

SEQ ID NO: 536935 - DNA, 969 bp, Stenotrophomonas maltophilia
atgagccaaggtgaaaaccagctcgccaatgaagcggcgggcaatgacggtagcgatgaagctgccatgagcctgcttgcaggtatgcgtgaacgcgaggaagaggaggagcagggcggtgatcccgctggcgaggccgctgacgagcaggagcgagaggatgagggtgctgcggagggcgaagaagccaatcccgagcaggaagagcagccggagcctgagtttgaggtcaaggttgacggcaagaccctcaaggtaaagcagtcggacctgatttctggctatcagatgcaggccgactatcagcaaaagacggcaaaactggcagagcaacgccgagaggtggaggcaagggatcaacggattcagcaggagcgcaatcactacgccaaccagctggacgttctgatcggtgccgcacataggcagctcgctggtgatagcgccgctttgcaggagctgatcgagactgacccgcaggcgtatctgcgcgaacaagccaagctccaaacccgcgcacagcagctggaccagctgatgcaggaacgccaagcccttgcaggacagcagtccgccgaggagcagcgccagcatcacgaatgggtcaaggctgagcgtgaggcgttgcgtgtcgcactgcccgaatgggccgatgagaagaaggcaaccgccgagcagcaacagattgctgagtatctgcttgagcgcggctacagccaggatgaactgcagaccctgcaggaccatcgcgcccttctgatcgcgcgagacgcagccaagtaccgggccctccagaaggcccaagcaaagcaggcccgacaggagccgcccaagaccatcaagccgggcgcccaggtcgatccgaagcaaaccaacaagcagcgcgacgttcaggacgcactcaaagccgcccgcaagggccagggcgatgacgactggatgcgctatctccgccaaactcgcaaataa

SEQ ID NO: 536936 - DNA, 936 bp, Stenotrophomonas maltophilia
atggccgttgtagccaatacctttaccacctatgccgctatcggtatgcgtgaagacctgtcggacctgatcgacaacatcagcccgaccgataccccgttcttctcgatgctgcgcaagagcaagtgctcggcccgttacttcgaatggcagaccgattcgctggcagccgccgcgaacaatgcccagatcgaaggtgacgacgttgccagcttcgtggcggtcagcccgaccacccgctggggcaactacacccagatctccaccaagaacttcgtgatctcgggcaccgagaacatggtggacaaggcgggtcgtgatcgtgaagtcgactatcagaccatcaagaagaccaaggaaatcaagcgcgacgttgaggtcgccatcatccagaacaccacgttcaacgcgggcgctgttggcaccgcacgtcagacccgtggcctggctggctggatcacccagggctcggtgggtgctggtactggtgcgttcccgattccgttgtccaacaccgctccggtggccggtacgcctcgcgccttctccgaggcactggtgaagtcggccatgcagacggcctataccgctggcggcgccccgacggtgctgctggttcgtccgtctgacaaggtgattgcatcgtccttctcgggtaatgccacccgctttgaagaggccgacagcaaccgcctgcacgccgcgttcgacttctacgtgaccgacttcggcaccctgaaggtggttccggatcgcttccaggacgcggctgcgtacctgatcgacccggcgcacgtctcgttcaagaccctgcgtccgctgaagtccgagccgctggcgaagaccggcgacgccgacaaggtgctgctgacctacgagtacggcctgcagatggacaacaaggacgcgcacgcgcagatccgcgacctgacctga

SEQ ID NO: 536937 - DNA, 273 bp, Stenotrophomonas maltophilia
atggccgtaatcgctaccccgaatccgaccccggcaactccgaattgcccggttcttccgaacaatgcgctggcggtcaccccgtctgacactgacaccttcgcacagggtgttgccatctattgcggcgcggcaggcaacgtgtcagttgttccgtggcactcgaccactgcagtgactgtggccgttctcgcaggtactgtgatcccgttccgagtgagcaaggtaaacgccaccggcaccacggccaccggcctcatcgcggtgtattga

SEQ ID NO: 536938 - DNA, 288 bp, Stenotrophomonas maltophilia
atggacctcatcactaccggtgtcgtccatgacggcacgaacatcattgagcgccgatcccaggatgtggcgccgatcctggatcacaccgcacgcctgcgaaacatgggcgaggtcggtgggtcggagttccgccacgcggccaaggtgccaaaggcggtcattgaaacctactgcaccaccaagggcatcacgttcgccgagttcatgggcaacgaggcccacatccgcgcattgctcaatgacccggatctgaccgggttccgcatctggaaggggcgtatctga

SEQ ID NO: 536939 - DNA, 612 bp, Stenotrophomonas maltophilia
atggcgattgttgactattcgaccctgcaggcgtcggtagccaactggctggcccgcgctgatctggggtcggtgatcccggacttcatccagttgggtgagtcccgcatcaaccgggatctgcgcgtgcgtcggatgcaggcgcgtgtaaccggcacggcctctgctggcctaattcccctgccggatgactatgctggcgctctatccctgaaggtgtcgtatgcgggaggccagtacgaaatctacccgctgaccgagatgaacgatccaacctatccggttaacagcggtcttccgctgggttacacggtggtcgggagcaacatcgagctggcgtcaggtcagcaggacattggctattcgttggcctattggtcaaaggttccgtcactgagcgcaagcaaccagcagacgtggcttctcactgaggagcctgggatctacctgtacgcggcgcttgttgaagcatcgccgtacacccgcgacgacgagcgcaccgttctgtgggcaactcaatacaaggccattgtcgaccgcctgcaggcggcagatgacggtgagcgctatggcaacgcgcccgtcatgacgattaagggagtcaccccataa

SEQ ID NO: 536940 - DNA, 321 bp, Stenotrophomonas maltophilia
atgagggtgaatccagaactgcgtctgccgggttcagagaaccaagagacgccacttgttcggcagatgaccaccgagtggcgaaagatggccactcagctcaaccagctctctgaggggcaggtcgtcgcagtgacgaatgctgcgacggccgccccaacgggcagcgttgttaactacaacctaggcgacttcattctgaacagcgccccttccgagctagggactgctggcagcaaatacataatccatggctggcgctgcgtagctgcaggcgctcccggcacatgggtgcagtgccgattccttacgggggcttga

SEQ ID NO: 536941 - DNA, 837 bp, Stenotrophomonas maltophilia
atgagttccggaaagaagaagacgaccaataccactgtcagcacgaacgatccgcccgcttggtcagtcccatacttccagcaggcgcttggccgcgccagtcagttgtcccagcagccgtacatcggctatggcggccctactgttgccgggtttacacccgaccaagagaacgcgttcgccatgaaccgctctctggctgacaagaatgcgatctatcgcgacaatgctgggcagtatgtcgactccgtcgttaacgggtacatcacgaacccgtacagcggagagaacccatatctgggcaacatgattgatgccgccaaccgggatatcacccagcggtacaccgaatccactctcccaacgcagcttgctcagttcaactcgggaggcgcatacggcggctcggcgatgcagcaagccctgtctcaggggcagcagaacctggcgcagcagctcagtgacaccaatttccagtaccgcaatgctgactatgatcgtcaagcgcagctctggaaccaggatcagcagctccgtcagaacgcgcttggcttcctgccgcagttgcagcagatgggctacaacgacaccaaccagatcctcaagcaaggcacgttgcagcagctcctgaaccagcaggctatcaacgacgaccgccagcagttcaatgagtggcgggattgggatgtaaaccggctgggcctgcttagcaacgcgctcggcgctattcgaggaggcaccggcactgaaacaaagaccggcgacaacccgaactataccagtgcgggtcagaatgcggccggatgggcggccgtcattgcatcgctgtataactaa

SEQ ID NO: 536942 - DNA, 966 bp, Stenotrophomonas maltophilia
atgcccgtacctaacagcatggccgatctggcgcagctggcgagtgccaactttccaactggcaccgagtccatcggcaacagcctggacaactacatccggtccgtttcggcgattctgcgatccaccaatgccgtggctacggcaaccattgcggttgcatccacaactgacattggttcagcagatgcagaggctgtgattgtcactggatcaggcacgatcaatagttttggcactggcttcgctggctgtaggcgtgaggtgactttcaacgggtccgtcacgatcactagcagctctaacatcgtgctgcctgctggttttacattcacaaccgcctctggggatacccactcctatcggtgtacgtcccctggcgtctggaagctggtaggccaatcctatccacagttgacgggggtcaatgggcttgtgcctgcgctcaatgggaagctctccaccgctggcggcgttctgactggcgacctgttcattcagaagaatgttcctgtggcctcgtatgtcagcccaagcaacaacaatgggttcaggacggttgctaatctgtctgactcagttcttgaccgcttcatcttccaatatgcggtcggtggcgtgtggtcggacatgttcactatggggccgagcggcgcaacctgccaaggaagcttcacagcatcggggaacctgatttccaactcggatgagagcttgaagagagactggaagagcctaccgggactgattgaagcactggccgaagtgaagtgtggcgagtatgagcgaatcgacctaggctctaggcaggttggtgtgggtgctcagtctctgcgcaaggccctgccacttgccgtggaagaaggtgagaacggcatcctgtcggtagcctatgggaacgccgccctggttggcgtaatcgagctgtgccgccgcctgatcgatcttgagaagagggttggataa

SEQ ID NO: 536943 - DNA, 894 bp, Stenotrophomonas maltophilia
atgctgcgctacttcaaatatctcgacgagagtggcgcgaagccgacgcttacgaaccgaaccctgcgctggtctcggccttcaaggtttaatgacgtatacgacatggctcaaccgtactccacagaccttgactcagggttcgttatagagcgcgcacttgacctcatgtgggagcgcctaagcaatccgaaagtgcatgccaacggtaaccatgtgggcgcgatgctagacgcatttcgttcaagtttcttgagcatgggcccagatcagtttcgcgaacaaatgcggccaggcgtagaagccgcacttgagtcctatccgcagcgcatggaggcttttggcgcggagattgtggagcacctccagagggtgaaggtactttgcctgagcagcacacacgacaacaacgccctctggggactctataccaatcatcaccggggactggtgttggagtttgcaaacgtggccgggctggacagcgtgtatcaatgcgcgcgaccggtgatttatagcgacaagccaccaccaatgttgggcgacgaagacttcgcgcagctcctggccggaaacatcgagctcagcaccaagttggtagatcccttgatgtatctaaaatctactcattggagttatgaacaagaactgcgcattgttactggcgaaggtcgaaaccgcgattctgagttcgaggacgtttggttccacccggccgaactggtggccgtgtacttcggggcgagaagccaagaactgcgtgccgaaatcgagccgttcgtcataagccattaccctcatgcccaacgctggcaggctgttgttgggaaagaattccgtatcgagtttgagcgcctcggcacggcaggtgtagggcgaggcaccgaccgctga

SEQ ID NO: 536944 - DNA, 750 bp, Stenotrophomonas maltophilia
atgagcgagatccagaccaatagcaccaccacctctgaactggccattcaacccggcgaaggggccgaggcagcgccggtatcgacgagcaggcagcggctgaacgagctggcccagcagttggccagcgcagtgcagcgcaaacgcgccctggtggccaaggtcgatacgatgcagcgtgccaaacaggctgcgcagggcgatgcagccacagcgcgccaacagtggagtgccaagctgcgcgacaccgatggcaacctcacccgcgatgttcagaagctgcgcgccaacgagcgttcggcgctgtcgctagctgaggagtatcaggcgatggaggacgagattgcggccgagctgccgaagctggagctggaactggctgagctggccgaccgttacttcagcacggcagagggagtcatcagcgaagctgccagccaagcgtatgagcaattgcttgcgcaagccggcgatagcctagcggtggccttctcgctgtttttgaaggcggagaatgcgggcgtgcactataggcagtcggccagtaccggcgaattggccagcacgttcttcggtcgtctcggcgaagcagttcgccatcgcctaaacgattccgcagtgaccgatcaggtggcgcaacagttggcattgccgccgatggatttgagtgcggtggacatggatctggtgcgtagcccggcgcgccgttctcagttgcgtgcacagatcagtgccgggagcgcggtgtga

SEQ ID NO: 536945 - DNA, 462 bp, Stenotrophomonas maltophilia
atgtaccgactcacgaagaatcccgacgagatatacaacacagtgacgtgccagacgattccccgaggccatcgtgattggcccgaggaatggctaatgaaccatgtacctgagcctgctccccccccatacctgctttactcgccggagcatttccgggccattcgtgaccaagcgtttgcatggatgcgcggcgaagccgttgctcgcggctatgacggcatcgaatcgtgcgccagctactacaacagcagcgtcagccgatatcggctggaagcacgtgcgatggtggcctggcgcgatgccgtgaatcagcagttggagcagctggtgctggccccgccggctggcatcgagacgtgggaccaggtgcgtgcgctgctgccgcagcctgacgccttcgactggccggagagggccgagttgccgttggatatgggcgagaaggcggtgctcacatga

SEQ ID NO: 536946 - DNA, 906 bp, Stenotrophomonas maltophilia
atggctcgcaagattatcgacctgaccacgcagcaccctgggtggatcggcgaccagtttcccgtcgcgtttgcgaaggtaaacgacaatttcgaagagctgtatgcgcgtggcggcgcgaacatgctcatcaactgcgggttgcccatcaaccaacgcggatttgccggtggcgctctggcggctggcgcatacggctacgatcggtggaaggccggcgcgggcggctgcagcgtcacgatcaacgcaacaacgggagtgttcactcatgccggcggaccactacagcaggtggtggaaacacctcacatggcttgggggcagccgcttaccgtaagcgttgaggatcccagcggccctgtggcggtaagcgtcggaggcaccaccggctcgattccggcaggcacaggcagagtgggggttacgttgacgccttcagggagcggagacatggtgctgcagctgactgctgctggtgtgacgtacagccggccaaaactggagcgtgggaacgtcgcaaccgcttttgtaccgctccaaccccaggcggagctggcgctttgccagcgctactacgagaagagctatgcagtcggcgtggcgcctggcaccgctactcgctctggctgccatgtgtcttcggcgctgacgggatacctgctgagtgcaccgttggttcgtttcgcggtagccaagcgaaccactcccgccgtgaccctcttcaatacgcagaacggtgccgctggacagctttcggagaacggcggggacggcctgcacacctacaacaagccggcagcggtcgactctgtgggtacgggatccttcgaagtcttcgtatccaacggaacggcgagtcctgggaacattgaacgagtgcagtggacagcggacgcggagctctag

SEQ ID NO: 536947 - DNA, 513 bp, Stenotrophomonas maltophilia
atggccaagatcactgcaaacgatgcgggcggcggcaatgtgctcgccttcctggacatgctcgcctggtcagagggaaccagcaccagcgcggtaacaaaggaccggggctacgatgtgatcgtcaccggtgctgatcgaaagccggagatcttcagcgactactcggtgcacccgttcgcgcagggacggaagtcgaaagtgatcaacagcaaaggcctgacgtcaaacgcggcgggtcggtatcagttcatgctgaaggactatgcgcactaccgagcgctgctgaaactccccgacttcgggccgttgtcccaagaccggtgggccatccagttgattcgtgagcggcgcgcgttgtcgttgatccagaccggcaaggtcgaggatgccatcgcccgggtgcggaacatctgggcaagcctgcccggcgcagggtacggccagccggagcacaagctggctgacctgctggcggtgtatcgcaaggccggcgggacggtggcgccgtga

SEQ ID NO: 536948 - DNA, 900 bp, Stenotrophomonas maltophilia
atggacaggctcaagaatggtcggtcatggcgaaggctcaagagcttgccgtgggtagggattgccatcagttcagtgtgtcttgcattgattgtgctgaggaacgtcttcccgagcatcttcaagatggacgcaatctcgattggactgctgatcatcggggtggcgccttggttccgatccgtgatcaagtcgatagatttgcctggtatagcgaagatcgagctacatgatgtggagaagctcgcaaagaaggtcgaagcatcggaacttcccagcgccgagacatctacttacgcaacgccccaggatgcttctggtgctgggcaattccttgaggaagtacctgccgatgtgtcagggcatgatgtagctgagccaggcagtagtcttgatgatgtgtcgactgaggtgggcaacgattccccaataccggcaccaacacccctaccagaatcagtgatcaccagtatttaccagatcgtgccgagagctatcgtcaagcctgccgcagcgctagctgagcttgagattaaaacagctgtactcgggagtgaaatgagaacgtcggtgcagctgaacgcaatgcgcgacatcttgctgcgcgggctgagaaacctatgtcagctcaacgatatctctcactttgctctttcgccggcagacatgctcgcaggccttgtaaagagaatggtcattaccgagaaccaggctgatggcatcgctgcggcgataaacatggtcaatgaagtaacgctggctccggcgacacctgaagcatcgcaaagaacgttggatgttgcgaaagaagtgagtctttcgctggacctgatgattagacaggccgagataattcggatggcgagaagcaggacaagccaccaccaggccaacaaatga

SEQ ID NO: 536949 - DNA, 768 bp, Stenotrophomonas maltophilia
atgtcagctgcggccatcctggagagccgtctgtcaccttgcggcaactgcggcagtgacctgatccgctgtcgtgagcgcggagggggcggttccaagcagtccgctcagatcgtgtgcacccactgtggcgcacgagggcagctttgcgtcggcgcggacgccgcgggtcaggccgcgcgcgactgggggcgcaacccatgcacagtcccggcgatcactgtcgggcgcatattgcgtgggcgagcgccagctcccgagccgaccctgcagcgcgatccgttggagctgattgctcggatggttgtcggcggcagcttccgtgagccgtctgacggcaggtcaaccatgcagccactgacgtccgccgacgttgccggtgccgttgggctgatgcgggatccggtcgccaagaaggctgtcgtagcggtagcgctacggggacagggcgtatccctggcatcgctggggcgctcgttgaccaagcgagttatgcggcagatccagtgggagcgtcgaaatggatccgggccggcgcttcgaatggatgagccggcagaccgctggcgaatgcgtctagtgctacaggacgccgtgcacgatctggtgtggccggaacggaaggtcaatgcacaggaagcggccaaggcagccaagatgcgaaagggagagtacctgcgtgtgtactccatcgccacgtccacatttcagaaagcgctcgaagacggccgagcggagtttagggccaggctttttgctgcgcggtag

SEQ ID NO: 536950 - DNA, 348 bp, Stenotrophomonas maltophilia
atggatgccatcgagaagcgggcgcgggaggttctggcggcggagcttgagaagtcaggtgatgcagagaacgccgcctgggtccgaagtggcgcggccgatggctgtgtgccgctgcgggcaatcatcgccgccctcacgccgcccgatgagcctgaccccgcgctgctgatcagcatggcggtgtgcctccgccatgggttcgggctggacacggctgaacagcagcaggcccagctgcgcgacatgcgcaagctgtgggacgaagtcatgggccgaggctactactcgtccggcaaccgcgagcgctacaccgccatgatcgccgctcggccggaggtgccgtga

SEQ ID NO: 536951 - DNA, 246 bp, Stenotrophomonas maltophilia
atggaaggcctgcacccaatcggcggcggcttggacgccatcttcgtttctaccgcagctgcgacgccagagcagcgattgcagcgctacgtggcggcccttaccgcacaccactgccgctggctcgccctgcgcgttcagttcggaaaggtcctgcagcgctcactgaagaacggcgtccggatcggctttgtcgcttggcagcggcagatgccagccctctggccgcgcgtccgaatcgattga

SEQ ID NO: 536952 - DNA, 555 bp, Stenotrophomonas maltophilia
ttgaacgccatcactatccgcaccaagggcgatgctgaaatccaactctccctctcacccgtctccatcaacggcctcatcgaactcgccgccgatcaggtggctgcccagggtgtggtggccatcggccacacgaaactgttggccgacggcactagcgctgcgggcaccgacccgcgcaccgatcacgtcgcagtcatcgaccacgccaccggcctgatgtgggcggtgaagtccatcggtgacgacgacgacgatccgatgagccaagccggctgcgagaaggcatgcagcgagctgcgcctgctcggccacgacgactggcgcctgcccactcgcagcgagctggccgccctggtcgatgacacccgacatgagccggccatcgatagctcgctcttccccggcgtgctgccgcgctggcactggaccagcacgccctgcgcctggtcctcggcgtccgcgtggtacgtccatttctacctcggcctcgtcgactactgccaccgcggcaactacgggttcgcgttggccgtgcgtcgtgccggtcagtag

SEQ ID NO: 536953 - DNA, 411 bp, Stenotrophomonas maltophilia
ttgaccgttgagcacgtcaaagccgccacgggcgactggtcaccacagatccaccagcaacgcgcggctatagcggttgccgcggcgctcgaaaccgccttgaccagcacgcagcccaccagcggcggcggccacgcattgaccttcacgttcgccggcgcgccgcagctgcaggccgcgtgcgacgcctggcgtgcatacgccctcgccaccatcgacacgccggcgccgctggtggcgacagcgacccagcggctgacggcccagatcggcctcgccctcttcgatgaccccacgatggacctgacacagatcgcaaaccttgtggccacggcacggtcggattcgcagaccgcgctgctgccggcgcccaccaatgaaacaacggaggcccgagatgggcgcagctga

SEQ ID NO: 536954 - DNA, 369 bp, Stenotrophomonas maltophilia
atgcaggacgaaattcgcatactcatctatgccgttggtacggcctgcctcttggcgtttatccacctgcagatttgtgcatggatcgcccatggctggatgagggctttctacgtggctggagcccgctggaggcgcgctggaatcgcactgcaggcgatggcgtgggtggcagcggtggctatcaccattgccggggtctcgttcctgctgtcttggatgccgagcagctgggggtggcgggacgaaatcggaacctttacctcgcacgcaactgaccttgccacctgggcgggcctgttcatggggtccggctgggtgtggtcactgctgcaggctgggcgccgaagcgcctcaaacctgccctga

SEQ ID NO: 536955 - DNA, 1539 bp, Stenotrophomonas maltophilia
atgtccgttcctgcctacaccggtccgaactcgtctgttgccaatggggtgacgacgaccttcccctatagctttaagatcctcgctgagggagacattctcgtaactgtgaatggcctgcctcgtgtcctgggcacgcactactccgtgacaggtgtgggcaacgagaccggtgggaacgtggtgttcatggccccaccagcggcaaatgcggttgtcgctcgttcgcgcaacatgcctttcaccagagtcatcgagtatcagaatctcggcgacctgttggcggggacattgaaccaagatcaagacgctccggtgatgatgattcagcagctcgcggcaagcgtgatgcagatcattttggacccggaaggaagtggcgatcttgtatgggatgcaaagggttcacgaatcatccgggtgggtgacgcgaccaatgacgcggacgcccttaacaagcgctcggcgctggtactcctcgagcaggttcaaggaggcggcgggactgtaggggtcactccgaagttctgggcgtttgagggcgacggcgtcgtgacggacttccccttgcccggcgccgatgttctggatcctctgttctatgacacggctgtcgagactgcagcaggctcgaacgtgtaccccgtttcaaagccaggaatcggaggcgcattcaccatcgttgagggcgcccaaggctctccgccagcaatccgcttcaacccgcctttgagtgacggcgtgcgcgggttcaccaccctgcgtggctatgcacgtccatggatcggccaacctccggtctataccgtcgcccctcgcatcgtgagcgtcagcgccagcaccaccatagacggcggatcgcacaacacgctgatcttggcgaactctgccagtcccatcaccatcaccattcgcaagaatacgggtggcagcgctgactggaaggaagggcagttcttctccgtcctgcagttgggcaacggagcggtgacgctggcgattcaggacggggctgggcagctcaatatcccggtgagcttccaagccaagtgtcgagggccgcgtagcatcgtcagtgctacctgcattgcgccggacgccgacgcctgggtggctgccggagaccttctgcgcatcgcggcatcccccgacctgcagtcgttcgacctgatcgaccgctcagtaaacatgggcagcgccatccaaaccggcaccgccaaggactgtctcgtcatgccctacggcatgctgctggacccggtggcgagtggagggatctatgcgagcctgtccgtggcccaggcgacaggcgtggttctaacggtggacgtgaaccgcaacggcaccagcatcctgtcaaccaagctgaccttcgataacaacgaacgcagcaccctcactgccgccattcctgccgtctacgaggttggcggcaacatccttgcgaagggcgacgagatcaccatcgacgtggaccaggtagggaccgcactggctaagggtttgcgcgtgtacttggttggtcagagggcaaactga

SEQ ID NO: 536956 - DNA, 390 bp, Stenotrophomonas maltophilia
atgaccctcaccccccgtcaggcggtccagctggccgccgtcgttgtcctcttgtccatcggaggctgctactacctgaaaggccggtcggacaccgcgaccaccatagagaacagagagctgcgagccagtgcgaaggccaccagcgagagtgtccagatcagtcgggagacagcctccgccatcgacctggaagcccacgaaacccgcgaacgcaccgccaaggcggtggaggccatccatgcgactgctactcaccctgaccctgattctgctgctgccgtcctgcgcattgctcaggaagcgcacgccagagccatacgtgccgcctgcagggtgcagcgaacgagcgattgcccagcgtccgccaacgccgccgaacgtccctga

SEQ ID NO: 536957 - DNA, 249 bp, Stenotrophomonas maltophilia
atgaaagagtccatcacccaagatattgcaatggcggcggccaaggtcgccccagctgccggggtaacagtgggaacgtacgcgcctgggtacaccctgagcgactgggccctgatctgcaccatcatttttaccctgctgcaagcattctcagtggtggtgaagaattggggcgattggacgcaatgggggcgcgcgcgctgggtcacggttcgccgcatcgccgcatgggtgttccgtcgtggctga

SEQ ID NO: 536958 - DNA, 1665 bp, Stenotrophomonas maltophilia
atgctgcctgatcggattcgcatcaagccgcgaatctcgttcctggcgttcttcgcgatgtgggcgaaccgcatgggctgggaaatcccagacctgcacgtccgcgtttgcatctttcttgagcaagcctgggttgggtccaacccgctactcctgctcatgctgccgcgcggccatgcgaagtccacgatccttgaggtgttcaatgcctggatctactactgctgggggctgacgcgaatcctgcaccagtccgaatcagacgggaccgcattgaagacaagccgaggcacgcagaacgtcctgaggaatcatcctctgacagctcacttgttgcccgctggcattggcactgttgaacagtggtgggtcaaaggggcgatggagaacgacgcccgcaacgcgagcatgtacgcgaagggcatcctatccaacacgacaagctcccgtgcggacttcatccaaaacgacgatatcgaggtgcccggaaacatcggcacgccggatgcaagagaaaagcttcgcttccgcctgggcgagcaagtgcacattgcggttccaggtgcgcccaaactctacattggcactccgcacactcacgattccatttatgaggacgtgaagcgccaaggtgctgccagcatggtggtccgtatgttccagcaggaatatcgaatcgagaaggctgagcgtggccgccacgacgttggcttccaccctgagtacgtgttcatggggataggtgagactgcacgccttctgacgccgggcgttgactacaagcttgaggggtcagtgcttgtcctggacaatcctggcggggcgctaatcgactgctacgcaggttcagcgtggcctgagcgctttgatcgcgaagagatgcagctacggcgccagcagacccgcactatcggcgagtgggactctcagtatcagctgcacgcgaagcctgtcaaagaggtccgtctcgatcctagtcgcatcgttccctatcaggacgagccaacgattcggaaggccaacggcgagacggccatgttccttggcaccgttcagatcgcgggcggcgccattcggtgggatccttcgagcggaaagctgcgctcagacatatcggctgcggccttggtgctgcaggacatttacgggcgcagataccttcaccgaatcgcacagctcacgggagaggtacttgagaccaccgatgacgggatgcggatcatcggcggccaggtgtggcagctctgcgacttggttgaccagttcggcatcaccagcatttcggtcgaaaccaacggcatcggtggatttgccccagcctcactcaaggcagcgctcaaacagcggcgtatccgctgcggcgtcaaggaggtgacatcctccgcgaacaagaacaagcggatcctcgaagcatgggagccgcttctcaagtccaatggtcagctctgggggcacgtagaggtgctgagagggccgctctgggatcaggctaaggactggaaagccgacgtttccaatcagccggatgacctactggacgcaggcgcgggagcgttgaccagcactcctgagcggatccacaaaattgtcgggaacccgcatatccccgaccgcgaacattggggcaccagcgctggagtcttcgaggttccattcgagcgctga

SEQ ID NO: 536959 - DNA, 324 bp, Stenotrophomonas maltophilia
atgagagatgaccagcgcaagcgcctacaggatgtgtccgaatccctggccgaggtggctatccgtgacgctgacccgtccaactggacagcgttcgataagcccctgtgcgacatgagcaaggacgagcgtggagatgccgcgtggtgcaggaagaccgctgttcaatcggtcgccctgctgtgccgcctacagcagctgctgagggacacgggggcaccagggggtggcgacaaggatccagacccggaggccgaaatcaaggccgcagagcgcgaggcaaacaagctccttgagcgcattggggcgaagaatgctgcctga

SEQ ID NO: 536960 - DNA, 2400 bp, Stenotrophomonas maltophilia
gtgagcgtctttgagattgatgagcaaggtgggcttgctctgaacgagcaggtctctcgcaatcccctggacctgtccaaggtcacccctggcatgttctctgggttcttctccgccgttggcggcggcatcatgcagggcggctcgcgcacattcacaaccgttgcgctcgctggcgcaccagctgtcggagctcgtgacaactaccttgattccttccggactccggagtctgccgccctggctcagtcgctcgggataaaggcggacctccgtaagcccgaggtgagtgggcaggagtggtatttccggaacgtggtggaggacgtggggcaggcggccaccgactactgggcgccagatcccgcgcagaccggcaccgcaggtcgaatcgctggcggtctggcacagattgcaatcccactggccgctgctggcggcaacccggcactgctggccggtaacgagggccttgaggcaccggctggactggtaaagcagggtgtcggggcgggtgcagctatccagttcggcgccgtctcagctggtgcgacgatgctgggattcaagatcccggccagcttcgggaccactctgctgcagcgcatcggcacgggcgccgctgccaacttggcagtaggcacggccactgctgcggcccagcaggcagtgcttgagtctgcgggcaatgctgaaatcgccaaggcatacagccctctcaatcttgaggctcgggtggtcgatgtactgacaggcgctgccttcggtggcatcgcacacttgcaggccgggtcaaagccaaccagcgctgatcgcgacgcggtgctgaccgtggcaaacgccaagcacatgcaggttgataccgcacccggtctcccccgtgacgaggcatccagcggcgcccaccagaccgcgcttgcgtctgcaatggcatcgatcctgcgtggcgaacaggtcagcgtcgccgatgtgatccaggccgctgagttcctacccacgcgtagggctggcgtcccaaatgatctggccgccaactacgagttcggcccggcgcgatacgaagcctaccgccgcgcactggagtctggcttccgcgcagacgccaccaactccagcagcagcgccacgggcattgaccagttcaccgcaggaacctggcgccgcatcgtcgcccaggccaagccagattgggccaacggtctgaatgacaaccagctgctggcggcgcgaaaggatccggcgaagtccggtgaaatggcccgcgctctagatgcacagaacactgccgcgctcgaggcggctggactcgacgtgtccgcgcacaacctctatgccgcccatcactttggcgaggagcgagggatcgcctttgcgcgcgcttccgatgacacacccatgtcgcggatcctgtccaaggcccagctcgatgcaaacccttacctcaagggaaagaccaagggcgatgccatcgccaattgggatcagcgggcatcgcgcatgggcatcgatgcgccacccgtggtccgtatgctcgcaagcgcggctcctgaggcgacaccttctgccgcttcgctgctgccaaccacaccggcagaggccgctcaggtggtcgagcagaggctgtccaccctggacgaactctcccagcaagggaggctcagtcaggaagaggtggccgcatatcggcaggaagacgccgcccttgttgagaccattcggagacaggaacagctgacgcgggacaacatcgtccctgctgacccccgcgaacggatcagccgtgaggagttcgatgcactgagcgcccggcgcgtcgagatccggcatgcgcttgagcgatccgacgcggccaagggatatgagtcggtggcaaagcagctgcgctccaggcttgaccgcgtggatgcagactccgacctcatcgcctttgcagatcggatcagcggcaaggatcagatcgcagtcaccccggcacgcccggtgctgcctgacagcggcgcaaccccggccatggaagtcccctcccgcccggcagcgcggcgggcatcgacccaaccgggtccggactggatgagcccaggagccctggacagccgaccgcccccagctcagggcgagccgatgcgcaatcaatcagccgcggctaccgatgccggcgcagcggagcagagcgctgcgccacgcgcgccgataggcgcggaaccggatagctccggcatagcccagcaggccgctgtcgaggcggtcgcgatcaacccagacctgcaagtgaccttggaggacgggacggtagtcaccgccgccgaggccctggcccgtgccgatgctgacctcgcacaggccgaaatcgactcccgtggctttgccgccgctgttacctgcgcattgaggtttgcctga

SEQ ID NO: 536961 - DNA, 2100 bp, Stenotrophomonas maltophilia
atggcaaagatcccgactggagggttcgggcgcggtgcaacgcaagccccggtggtacagacgcgcgtgagcggcgcaggcgttggcgctgttgctgaggctgtcggcaacctggggcaaaccgggatggccgtcgctgatcgcgcgcagtcggtggttgagcaggaggaacgccgccagaagcaggaggccgaaaccttggcgcgggccaaggcgatgaatgctcagctcgactatgagattgccgttcaggacgccaccctgcagaccgaggatgcaatcgccacgggcggcctcgatcaccggcaggccgccgaggagtactcggccaaggttgcgcagattgagcgcccggccattgacgggctctcgcccgatgccaagctcgcctatgagcgcggcactacccgagctgcgcactccggccagatgaaggtgcagcgcgccgtgcagggtgcccagcgctccgagctgcgggaccaggtgacctcaggactggacaagctcggcaaggtggcaggcatgcccggcgcggatatcgccgccgttaacctgcgggcagaacagcttgtcagtggcctggggcgtcagtcgggattgaccgatgctcagaccgggaagcttctgcaggacttcaaggatcgcaactggacgactcaggcaactcagcgatccatcttctcgcgtgagaaccccgaggatctggcgaagctggagcatgacctgtctgcggcagacggcttctatgcagacaagctcgatccggagaagcgcaatgccctgctttcccaggttgtcacgcggcaacagacgctggtggatcgggctgagcgtgctcaggatcgcctcgatgccaagggccagcgtgtcatcgaccagatcgaccggcagatcgcaagcggcgtcccagccactgccgacatgtgggcaaagtgggccgacactgtcaaaggcacaaccgctgctgccgagtttgagagtcgggctgagcaggagaaggcagttcagacgatcctgcgtctgccgcctgaccagcagcaagcgtatgtgcaggcggctgagtccaagctgctgaccgatggcgggagcgtcgcccagaaggccaacctcgaccgactcaagaacgccgtcgagacgaatcagaagcagttgctcgatgcccctctcctctacaacgccgcgcgggagggcggagaggtcgaggcattgaagatccaaacgctcgcatcgcccgctgacgcctgggaaatcggctctcagctcaatgaccggatggcaacgattaccggcatgcgcaagcgctttggaactcaggttccggagcggctgcttctgcctcaagaggtcaagatcctggcggacacgctcaagaactcgaccgctgtccagcaaacctcgatgctgggtcagctgcgcactgcgacgatggatgacaaggtgttcaaccgggtcatgcagcagctcgcaccggaggagccggttgttgcctacgcgggcatgctggcaaccaaggagcgcgcgagcgtcaccactgccaagcactttttcagcccgaacgagacagtcggcgcgcgcgacgtggccgcgaccatgctggagggaaaccgtctactgcagcagaaaggcgacagcaagttccccgtcccggctgacaaggagttccgcacagcgttcaacgatgcaacagggcagctattcgcaggtcggccaggggcggcagacgttgcgatgcaggccgtccgtgcttactacaccggcaagtcttcggcagagggcgacctgagcggagaggttgacacaacgcgactgcggcaggcgctgcgtgcctcgctcggtgaggtggtcgatatcaatgggcggggcgaagtgttggcaccgtggggcatgtctgccgctgattttgaggaccgggcagaggcttcattcctggcagccgcgcgggccgctgagctgccggattcgaccgtcaacaactttggtgccttcggcctgacccaatccggtgagaacacgttctttgtcaaaagcggaatgtcctacctctataagaaggatggaactcctctggtgattcgcatcgacgggagcagccagccgtga

SEQ ID NO: 536962 - DNA, 480 bp, Stenotrophomonas maltophilia
atgggcgttgcagtaattccggccattcagtggggcgcgacgatcctggctgcgggagccgcagtgcagcagggtatcgaaaccaagaagtacaacgactatctcgcggatcaggctgaggctgataagcgcactgcccaaagcgcggcggaggtggaggcaatgcgcatccgcaagcagcgcgacaaggtacgagcggacgccatcgctgagcttgccgcctctggtgtggacgtgaacagcgataccgcgctgaggatcgatcagcaaattgtccgcgactccgaagaggacgcctatctgtctctcgctggcggcgtggaccgcgccaaccgtttggatgctgaggcccaggggtatcgggtcagcggacagcaggcacgaaatgccgggtacgtgaacgctggtgcatcgctgttgaggggcgccagcaacaacgggcgcgggtggaagaagcccgccgctgcaggaggctactga

SEQ ID NO: 536963 - DNA, 447 bp, Stenotrophomonas maltophilia
atgatccgctcagctacccaatccgatatcggctccttgctcgtgctggctgaggccatgcacgccgagtcgggctatgcacgtttcccgttcgctccgggcaagctggcgaagctgttcctcgcgctgattgacggcggcggctgcctgttcgttgccgaggaggacggggaagcaatcggggtggccgctggctactgcgaggacttctggtttgccgacgccaaggtggcaggcgagttcggcatctacattcgccccgagaatcgcggctcgcgcgcaggcgtcgagctgctgcgcgcctatgtcggctggtgcaaagaggcaggcgcagacctgatccaagcgggcatcaccactggcgtaaccctagagcgaacggtcagggtctacgagaagatcggattcgtccagaccgggaccgttctcgaatacaagggggactga

SEQ ID NO: 536964 - DNA, 2214 bp, Stenotrophomonas maltophilia
gtgaagttcaccaccatcaagaccaacttcactgccggtgagctgagtgagcgcctggctgggcggacggatatcgaccgctaccagaacggagccaagcggctggagaacgtgttcgtccttgtgcagggcggggtgatcggtcgctacggccttcgcttcacccagcctgccaagcacggcgataagcatgccttgctggtgccctatgtgttcaaccgcgatcaggcgtacatgctggagattggcgacgcctatctgcgggtgttcctgcagaacggcgctcaggtgcaacgtgagacaacggcgggcgtgttcgtcccctacgagatccagactgactacgccgaggctgacctcgactccctggactatgtgcagagcggggacaccatgttcctgttccatgagaactacccggtccgccgcctgcgtcgcttcggcgatgccgcgtgggtgctggaggatgtgccttgggtgacggtcccgtatgccgaggtaggggagcggcccgccgcgagcattactctggacagtgccgaccttggccctgggcgtaccatcacggcgagcgccgccgcattcatgccatcggacgttggccgggagattgagacggagggcgggcttgcgctcatcaccgcctataccagcagcaccgttgttaccgtggacgttctcacgccgttcccctcgctcacgatcccggctggggagtggatcatcaacggtagtccgttcactacgctgacgccgacgtggtcgggtggcaccggcaacgaacagccagcagtcggggcgaccatcaccctgaccctctctgcgggtggctggcgcgcggatgacgttggcaagtgggttgacctgaacgctggcctcgtccagatcacggctgttacgtcttccactgtggcgacgggagagctgcgcaagaccatgtccgctctcgtggcggtgccagctcaagcgtggctcctgatgggcaatgcctggggcgggggcaacggctatcccaggaccgggacgttctatgagcagcgcctatggacgggtggatcgcgcaagttcccgctcaccatgtggggttcgcgcatcggggaatacctcgactatgagcttggcgcagaggcggatgacgcaatctccctctcggcagccagcgagcagcaagacgcgatcacgcacatgaccgcgctgggctcgctgatcgctctcagtgctggcggtgcggtgaccgcgcgcggaacggacgactccgcgattgcgcccaacaacaagaacaaggtgaaggcgcagccaaacttcggttgtagccgcgtctccccggagcgcatcggcaacgagttgatgtatgtccagcgcggtggccgcaagattcgggctctgtccgctgatcgcgtggacgcggaccagttcgcggcaccggatatcacggtcctggcggaacacatgttcaagagcgggatcacccagatggcctatcaggtcgagcctgagtcattccttttcgcctgcctgggtgatgggcgcttggctgtctgcaccttcgaccgggaccaagaggtgatcgcttgggccgcacagtccacggtcgggaaattcgatgctgtttcggtactgccgaccgaggacggcgcccagatttgggtgatcgtcatccgtgaggtcaacggccagcaggtccgttatgtggagcgattcgatccggccctttgcacggacagcgcgatcaccggcagcaacccggctggagcaaccgtatgggatggcctgggccatcttgaggggttgacggtcaaggtcaaggcggatggcgtggagctcaacgacaagatcgtggcgggcgggtcgatcaccactgaacgcccggccaagaccattgagattggcctcccctacacaccgcgcgtggagctgcttcgcccagccacccaaacccaggagggaacggggcaggccggggccgtgagcgtttccaggattgtctgccggttccacgagacgaccggggccactgtcaatggacagacgttgatggcacgcaagaccggccttggcgctctcgacaagccgccgccgctggtgacagacgacgtgccgatttcctcgctcggttggaacaacggggactatcgaatcgtcatcgagcagccgcagccgtacccattccacttgcaagcagttctcacaaccatctcggtgaacaacggatga

SEQ ID NO: 536965 - DNA, 615 bp, Stenotrophomonas maltophilia
atgacagaaacagccaacgcagtaaccatctgctccaacgcgctgctctcccttggggacaggcccatcgccagctttgacgagggacaggcgtcctatggcgaccttgaccgagcaaagctctgctcagcgctctatccgcaggtgcgtaagtcggtcctccgcagccatccgtggaactgcgctatccgtcgcgtgcagctgtcgcctgacgccgctccgccagcattcggatttaccaaccggtttctcctgccgggcgactggctgcggaccctggctgttggggatcgtggcgtgcgcatcgacttccgcgcggagggccgctatctgctcagcgacgccgtagtgtttccgctgacctatatcgctgacgttccggagaacacctgggacgccatgctgatcgacgtgatgactggcgccatggctgctcgcctcgcgtatcccatcaccaagtctgcggcgatgatcgaaacgaagacggctgagcttcgcgccctgatgcagacggcacgcgccgttgacggccaggacgacccgcccgagacgctgggcgacttcccgctgatgacggcccgccttggcggctacggctgggggagcatgcggtga

SEQ ID NO: 536966 - DNA, 519 bp, Stenotrophomonas maltophilia
atggcagtagttcagaagggcagcgcggcgatcaccgcccgcgactcggccccctcgcagaccaactcgcagcaggcttccaccaaggtggcaactggccgcgtgaaggaatccatcggcgtcatcgcggtggcgaacggtgacagcaccgcaagcgtgctgcgcttcttctccatccattccagctggcgtgtcggcgcggtgctggtttcgtgcaccgccctgaccggcgctgcggctgatatcggcctctacaacctgcccaagaatgcggcgggcgctgtcgtggatgccgacttcttcgcttcggcgcaggatctgtcggccgccctggacgccaccaacgtcctgcgcgagtcgggcttggtgaccgtcgagaagctggaatggccgatctggcgcctgctgggcctgtccgccgatccgggcctgtactacgacgttgcggcgaccctgaccgctggcgccaccgctgccggtttcatcggcctcaagggccacttcatcgacggcaactga

SEQ ID NO: 536967 - DNA, 864 bp, Stenotrophomonas maltophilia
atgagcttccagatcaccgaagcgttcgtgcagcagttcgccgacaacttcaagcacgtcgcccagcagaaccagtcccgccttgagcgctgcgtcaccatcgagagcggcatcgtgggcatgtccaagactgtcaaccgcctgggcaagcgcaacgcacagcgccgcctcgttcgccatggcgacacccccatcaacgatcagccgcattccacccgctatgtggatctggaggactgggaagacggcgacatgatcgaccagctggacaaggtccgcctgctggtggacccgaccagcgattacgtcaaggccatggtcgcggcgatgggtcgcgctaaggacgacgtgatcattggtgccatgggcggcggctcgcgttcgactcagggcaacatcctgctcccggcctcgcagaagatcgcgctcaacgccactggcctgacgaaggccaagatcatccaggccaagaagctgttccgccagaacgaggcggacgaggagaacggcgaggaactgttctttgcctacaccgcgcagatgatggccgacgttctgggcgacccgaacatcaccaccgccgaccagaccaccgtgcagatgatccagaacggcacgatgaagggccagtggatgggcttcacctgggttccgtccgagcgcctgccgcgcgccgcaggcactgcctttggctatgcctgggccaagaccggtgtcgccctgggcatcggcgaagacaccaccaccgaggttggcaaggatccgggcaagggcttcaacgtccgcgtctacgccaagcaggccatcggctcggtccgtgtcgaagaggagaaggtggtcgaaatcgcctgcgcggacgcctga

SEQ ID NO: 536968 - DNA, 162 bp, Stenotrophomonas maltophilia
atgatccgggtaaggatcggcgggcgcatgtcaccggagggcgcagagcgcgtcgccagaatcagggcgaaggcgtggcaggtggcagcgtggggattcgccatctatgccgtggccttcgcggtaatggtcctcaaggaagtcatcacgctgttcctctga

SEQ ID NO: 536969 - DNA, 819 bp, Stenotrophomonas maltophilia
atgaatgacgtagtcaaccagaacccggacggtcagggcggccagggtggcaaccagggcggcggctcgctgctgaatcagggtggcaacccgaatgactggttgccggagaagttccgcaccgtgaaggaaggcgggagcgatcttgacctcgaagcatcggcacgcaagctggcgaccagctatgccgagctggagaagtcgcgcggcgctcccggcaccctgccgaagaccgcagaggaatacctgatcgaaggcatgccggatggcgtgaacatcgatgaggtgaaggccgatcccttgttcaagggcatccttggccgcgcccatgaggcgggaatcccgcaggaacacgtcaacttcttcctcaaggaatacttcggcttcgctccggatctcctggcgagcaatgttgctgccacccaggcggaggcccgcgcggagctgggcaaggtatggcccgacgaccaggccatgcagaagaacctgggccaagctatgcgggctgtccaggcattcgctgcagagggcgatgctgctgggagtctgcagcgactgcaggacaagtacggtaacgatcctgacttcctgcacttcgccgctgccgttggcgccgagctgagcgaggacaccccgatcaacggcagcccgtccgccacgcaggattgggacgcgaagatcgccgccctgcgcgcggacccggcctacagcgataagagccacccgcagcaccggcagaaggttgatgaggtgagcgccctgtatcagaagcgctacgggaccaacgcccggcagctgggctcgtcggcagtccgatga

SEQ ID NO: 536970 - DNA, 234 bp, Stenotrophomonas maltophilia
atgagcagatcaaatgtcgaagtgacgccggaaatgtattcccgcgtgttcgagaaccacgccgagggcgcgctgatccttgaggacttggtgaagcgcttccatcggcccgccgagctatctggcggtatcgacgcaatcctcaccacctatcaccgcgagggagcccgctccgtcgtggatcacattgtcaggcaatgcaactttgcaaacggagtggacccgaatgaatga

SEQ ID NO: 536971 - DNA, 1605 bp, Stenotrophomonas maltophilia
atgatgaacgccggtcgcatctgtaagcgcctgtcagaactcaagagccgccgcagctcgcacgagccagtgtggcgcgactgcttcgagatgacctatccgctgcgtgcccatggctttaatgggaacgtggtggacgcgcagcaggcccagaaccagaaggcccgcatcctcgattcgaccggcacagacgcaacccgcatcctggcatcggccatcatgtcgggccttaccccggcgaactcccggtggtttgagctggacgttgatggcgagacgaccgaggacaagcggtatctcgacaatgccgctgagacgatctggctcaacatccatcaatcgaacttcgacgccgaggcattcgaggcgtgcatcgatgcggtggccggagggtggtttgctctgtacgtggaggaagacgctgagcgcggcggctactcgttcgagcagtggcccattgccggtgtctatgtcacaagcacgcgccgcgatggcctgattgatacctgctaccgcgagcattccatgcccgccgctgctgccgccgaagcgttcgggctcaagaacctgagcgaagcgacacagaagctggtgaaggacaagcctgacgagcaggtttgtttcattcacgctatcgagccgcgactgccctatgtggtgggcgccaagatggcaaagaacctgccattcggctcctacgtggtcgaggcaaagaacaagcacatggtccgcgagtcgggctatcacgagttcccggttatcgtgccgcgctggcagcgcatccctgatacctcctatggcatcggccctgtcttcgacgcgcttccagatatccggatgctcaacgagttgaaggcgctgcaactggcatccgccgacgttgccattggcggcatgtggattgccgaagacgacggcgtgttcaacccgcgcaccgccaagctgggcccgcgcaagatcctgatcgccaacagcgtggagtcgatcaagccgctccagaccggcgcgaacttccagctggccgactacttggtaaccggcgcgcaggcttcgattcgacgcgtgctgatggctgaccagctgcaaccccaggacgggccacggatgacggccactgaggtgcatgtccgcgtggagatgatccgccagttgctgggaccgatctacgggcgtctgcaggctgagtacctgcgcccgctgatcgagcgctgttttggcattgccttccgtgcgggtgtcctgggcgatccgcctgaatcgctggcgggacgggactactcggtccgctatgtctcgccgatggcgcgcgcacagcgcttggaagaggtcacggcaacacagcggctgtacgaaagcgcgtccctcattgcgcaggcgaagggtggcgacatgtccgtgtttgatcgcctgaacgatgacgcggcccttgaaatcatcggtgacggtctgggcgttcccagcaaggtcatgctcagcgacgacgagatgcaggcaaagctcgatgcgcggcagcaggccgcagagcaggccaggcagcagcagttgggtgagcaggcagtcgccatgtccgcccaggcacagagccaacagcaggcagcagcatga

SEQ ID NO: 536972 - DNA, 231 bp, Stenotrophomonas maltophilia
atgtgcggatccaagaagcagcccaaggttgtcgagcgagacctcgtggcagagcagcgcgccgccgaggccaccgcagcatcggaggcgaatcttgcccttgccgggcgccgccgccgccgccgcgagagcagcctcctgaccttgggcgccgatggactgatgggcggcagcaatgccccgtcgctcctggcaagcgctcagggccgctcgactctcgggggcgcatga

SEQ ID NO: 536973 - DNA, 420 bp, Stenotrophomonas maltophilia
atgcccgcgcccgacctcaagccccgcgttcccggcgaggccccgaccgctgaaaccaatgctgccgatgctggcgcgcaggactccgccagcgcttccgacccgaaggccgaactccgcgccgagcttgaggccatcgtctcgctcaacgctccggacgtgatcggcgcgctgccgacgatgaatcgtgacgagctggcgctgctgcgcgagctggaggccgcaggcaagggccgggtaagcgtccttggcgctgtggacgaagctctgagcgctggtgatgctggccccaatgctgcccccgctgctggtgagcaggcgcagacgaattccgtacgcgcccccgcagctgacacggcaggccggcccaccctgaccgatgcgggctgggttgtccctgagccgaagccgaagggctga

SEQ ID NO: 536974 - DNA, 282 bp, Stenotrophomonas maltophilia
atggaagaacaggactacttggcccgcctcatcggtcgggacgttgcgcaggagcgggctctcctgacccttatcggaactcatcaggggggcgatctggtcgctctcactgaactcctgcggaagaacaacgaaatcggcaaggcccagctcagcacgcgcctgcaggaggcgaagcttcctgcgcaccttctgcgcatggcagaacatgggttcagcctgacaaccacggcaatcctcaacggcgtcaggaaccacaagttccaaccggctcagcgctga

SEQ ID NO: 536975 - DNA, 231 bp, Stenotrophomonas maltophilia
atggtcaggattgaggcgctggagggtcgcgtcgattggttccgcctgctggatgacctgtccaggcgcggcgtttcaatgggcggagtggccgcctacattggcgttccgcgctcaacgatagtgggctggaagcagggggccgaaccgaagtaccgcgacggcgagctgctgctcgatctgtggatcgcgaagaccgggcagagccgccacgaggctccgaggacgtaa

SEQ ID NO: 536976 - DNA, 225 bp, Stenotrophomonas maltophilia
atggcaatggctgattgcatcccgaccgcccctcaagcgctccgacactacgccgacaccctggagcagcaggcggcagcctacgaccgcgtgttgcgccggagaggcggagagcgctcgactatggctgaggcgctgcgtctggctgcatctctggcccggcagcaggcacaccgcctggagaggctggtcgcacagctggaggagggtgggcatggcaagtag

SEQ ID NO: 536977 - DNA, 1449 bp, Stenotrophomonas maltophilia
atgagccgccgtgcagaagtgcagctttacagcctggacgcagagcaagtggttctcgcgggcctgatccttgcaaacgacaccctttcgcaggtgcaggattggctctcgccggaggacttctggagccgcgatcacgccgccatctatgagggaatcgttgccctgtgcctcgcgggccaacctgctgacggcgtgaccgtggccgagtgggtccagaaccaaggcggtgaggacgcgaacagccgtgcatcgcttgtgttcgagattgctggcagcgcctacacggctgcgaacgtcgtcccgcatgcagagatcatcgccagtcattcccggcgtcgtcggctggcggatctgcttggccgcgcccatgacgcggcgctgcacaagcgggaggtctctactgaggaaatcatgtctcggttgtcagcgctggcatccgagcttgccccggcgaacgcagggggactggtcccgtaccggcactacgtcacgaggttcaaagacgaccttattgcgcgccatcggcacggaaaacccgttggccttcctactccgtggtccgatctgaacaagaagatcggcggacttcgggatggcgaggtctacgttattgccgctcgatccaacatgggcaagtccaccctggctttccaaatttcccggttcaacggcctgcgtggggagcagacagcggtcttctccatggagatggttggcgagagcgctgtagcccgtgacgtgtccgccttgggaaagatcccgctcgggtgggttgtaggcatggaaagcgagttcagcgcggacgacagtgatatctactggtcgcgcactacgccagccatgcagaagctcatggacgcgtccattgtgttcgatgacgctccccagctctcggctactcagatcatcgccagggcgaagcgagcccatgcgaagaagcgcctacgcctcgtggtgatcgatcacttgcacgagatggcactgccggggaagcagggagaggtgattgagcgtggtcaagcaatccgcgacgtgaagggccttgccaagcagctcgggtgtcctgtggtgatcctggcgcagctcaaccgggatgccgccaacgggcgaccgcccgaaatcaaggacattcgcggctcgggcgggattgaggaggctgctgacatgatcctcttcgtccatcgccctgactactacaacccggaggaccagccgggcgttgtgcagatcatcatcggtaagggtcgcaacgtgaggacgggcgatgtcatcaacctgcatggcgagttccagtatcagcgcgccgtggattgggatgatccggagtatgagttcgtttctccgccgcaaccggcaccggcaccggcaagcaagccgtctggacttgcgacgcgagtgggcagcaggaagagtcgcggcggaggcgggtggaatggcaatggctga

SEQ ID NO: 536978 - DNA, 987 bp, Stenotrophomonas maltophilia
atgactgaggcagccgaagcgcgccagcccaagggccggtatcgcaaggtcgaggtgaaaatgtggggcgacgagaagttccgtcgcctcaccccaatgccgccttgcggccaaggtctttggctgtatctcatcaccggaccgcataccggccctattcctggccttttccgcgcaggccgcgccgcccttgcggaggagcttggttggggcatggaaggctttgacaaagcctttagcgaagcctcctcgcaaggcatggtcaaagcagatttccaatcccgcgttgtgtgggttccgaaggccatcacccacaaccgtcccgagtcacccaacgtggtccgtgggtggggtgcggagttcaacatgatcccggagtgcgccttgaagtcggaggcgctggatcacttgagagccactgtttgcgggctcggagaggctttcgccaaggcattcaatgagactttcggaaagccttcggcgaaggcttccgggaagactatgcctaatcaggagcaggagcaggagcaggaacagcagcaggaacaggatcaggaagaagaagaacccactaacgtgggtttgtcgtcagccagcggcgttgccgcgactggcgacgggagcgtgagcggggatcttcttggagactcggtgaagccgaagcccaagaagaatggcccgccgccgtgccctcacttggaaatcgttgatctgttccacgaggtgctgccggagttgccggaggttcggtcatgggaggggacgcgccggaacaagcttgcagcgcgctggaaggccgacgcttcgcggcagagcatcgagtggtggcgtcagttcttcctgaccgtccgcaaaagcggatggctcatgggcaaggtcaacggccacgatggcaccccgttcaagtgcacgcttgagtggcttgtcagtcccgaaaacttcgccaaggtgattgaggacttctacacgcggaggggcatccgatga

SEQ ID NO: 536979 - DNA, 264 bp, Stenotrophomonas maltophilia
atgccatctcacgacacaagcatcaactcagccgctgaaccggctgcactcgtccgcgttgagcggatcaatggcgttgtattcgccatcctcaccgaccccaatcacccagggtttgagtacgaccccagcattcacagcgcggagcaggctcaggaaatcgcgcgccatgtcgctgataagcggtggatcactccggcgcacttggcgcagttcgcagcactgatgcgcgaagagttcggcgatggagcctgcaatgactga

SEQ ID NO: 536980 - DNA, 228 bp, Stenotrophomonas maltophilia
atgctccccaacatgctcaccaagaccgacgccgtcgcccttttcggctctgtgaaggccctgcaggaagcattgggcctcaagagtcacgcgaccatttccatgtggcctgcgggaaggatcccgcgagtccacgaactcgaaatccgttatcgacttcgccccgaggcattcgacgctgagggcaacctgatcgctgcggcggtcaactcagaagacgctgcctga

SEQ ID NO: 536981 - DNA, 384 bp, Stenotrophomonas maltophilia
atgggcgaaggaagcgagaacgaggactatccggaagtggtccgagctatggacttctccgactcttacattcggaacctcattggcttcctgccaccgcctggccggttgaagctggtcacgggcgtgggcgattccatggtccccaggattcagcccggcgaggttgtcctcgtggataccgggtgcagcgagtaccagggagacgggatctacctcatcaactccggcaacggtcagcagctcaaggcgctgcaggatcgcggtgatgccgtgtatgtcgtgagcgccaactcctccctctacccgcctttccccgcgcccaaggggacgctcgtggcgggcaaggcttatctgattgggaagctcgaacgggtagcctga

SEQ ID NO: 536982 - DNA, 219 bp, Stenotrophomonas maltophilia
atgcacctgcgcgaaagcgagacggccaccggcagctccccggaacggtcacagcatagctacaccgtagttctgagcagcggcgacgagatgttccttgtccccggcgctacacccgaagaagccgcccgcaacgcggtagccagctgggcaaaccggtatggcgagattgtcgaagccatcagcgtctgccgtgccggtgaaggcatccaggcatga

SEQ ID NO: 536983 - DNA, 198 bp, Stenotrophomonas maltophilia
atgagtagggattgtctgacacaacaagatttggccccgagccgcgcggctggagccaaggtcatcaatcagaaggaaggcgggttgatccgcatcggcgacagcatcgacgttgtcgttctcaaggcacgcgacgggcgcacgcgccttgtcatcagcgccccgcgaaacctgcagatcaccgcacaaaaacagtga

SEQ ID NO: 536984 - DNA, 402 bp, Stenotrophomonas maltophilia
atggccgacaacagtgtaccccccaatctggatatccgagccgtcgcgcaggctgtgtctgaatctctcgacaatccgcctcgtgtggaactggcgaacgatacccactggacggaaatggaatgggaagggaaccccctgcacattagcttgaaggctcagcttgaacgggctgaccggtgcattgcgggcgcgtcctcacttgccagcctcatgcaccgtctctccattggcgcagcagacgtacagaacacgcccccggaggatggcgtccgggtcgtctacccggatgtgggcgcaaacgagatggatcggttgtggctcgctctgaatgaactcattgactacgccgagctcagcatcgagaaagtccgtggacaccaggaggtgcgccgtggctga

SEQ ID NO: 536985 - DNA, 225 bp, Stenotrophomonas maltophilia
gtggctgatcgcgcctcctacaagactgtctcactcgacttcgatcagatggcggcgatcaaagcccgactgaaacagctgcacgcgctgacggacgttctatcggagggtgacctcggcaatgttgatccggcctcgctccaggttcttggcgactatgcgggcatggcagtgatcgccatcgatgaggtcgtgagcaaagcggaggataaagccaatgtctga

SEQ ID NO: 536986 - DNA, 258 bp, Stenotrophomonas maltophilia
atgtctgacatgaccgtggagcggaaagtagatgggatgccgttgctggttcctgccggagcagagacgatccaggctctcgaaatggcgcaaacgtttgtcgaacaggtccagtcgctcatgtgggacgcgatgcgagaagcggcagcgtcggacgatgcgatgacggtcaagttcgactatgaccgcgtggtggtcatggagcggcttctgagcatgtcaaccgcgatgtatcaggcagcgggggcggtggcatga

SEQ ID NO: 536987 - DNA, 237 bp, Stenotrophomonas maltophilia
atgagcgcgaacaagaaggccccccatgtgccctatgtggtcatggaagagggaccaagccgcagtttggttgaccaaggttcgtgctacctcaccagcgcgcgcgcattgatggacttcgtgatggaagacctcaatgtagcaacagaccaaatgtggggcgtttaccacctcctgtgcctcgcggagaagaccattgaggcggcgcagattgtgattgcaaaggaggccaagtga

SEQ ID NO: 536988 - DNA, 228 bp, Stenotrophomonas maltophilia
gtgaacgagaccgcgaccattctggctttcccgatgcacagggtacggaagcgggcggctgatgggtttccccttggctggcccgctgggcctgccggggaagagatggaaaagcttgctcgcatggttatggctcggtcactcgagaagggaaccgatgtgagcctggaggactgccgagcgtcgatcttcgccgtcgtgtacgagacccgcctatgcaacggataa

SEQ ID NO: 536989 - DNA, 279 bp, Stenotrophomonas maltophilia
atgaatctgacgaaccgacttcgggcggagttcgggctcgatgatgacgggatgatcccagccgacaagctcggctcggcgatggagttgcttgtcaagctgcacgagtgggcccaatgccactgcgggtggaacaacgtggccgagctgcgcgatgacatgcgccgtgttgtgggcgggggtcacccgttcccaagcaaagggattaagcgtggcccgcgcgacagatcccgccgagtgaagtgctggtgggaggagtacgaacatggcaacgcatag

SEQ ID NO: 536990 - DNA, 252 bp, Stenotrophomonas maltophilia
atggctgacacctatcgcatcgaaaagatcggcgacctcctgctgatacctctggatcgacttcccgcgttcattggggagctggagacgggaattgagatggttcacttcgtccacggatctgcagcccgcccagagctgctgcccacgatcacctgggtagacgatggggagcattcaaccgaagttcgccaccaagacggcagctacttgcgggtcgaagtcagggagaacgacgatggcggcagctga

SEQ ID NO: 536991 - DNA, 954 bp, Stenotrophomonas maltophilia
atggatggaggggaggctgttcgagcattgctcgaagccaatgctgatcgcgatgtgatcgtgatcaaccatagagtgagtcgtgatctacatttcaagctctctcgtacgctgcaggcaaatgctgtaaacgagagctgtacagtgttcctgaccaccaggggaggagatcccaacggcggctatcgcgtagcgcggtgcttgcgtcattattacaagcatgtccgtcttgtggttccgagtcgctgcaagagcgctgggaccctgattgctatagccgcaaatgaggtggcaattggtgatcttggtgaattgggcccgttggatattcaggtgaagaaggggtccgagcttgaagagaacagctctggcttggatatccagcaggctcttcaagccgtcactacgcatgcacaagacgccttctatcgtctgatgctaagtactcgtgagtttggcctgtcaacgaagctgtgcgctgagtttgcagctacagtgacaagtgggattgtccacccattgatgagtcagattgacccactaagggtcggcgaaatgcaacgcgccacccgggtagcgctggagtacggcgagcgccttaacacctatgcgcgcaacctgaagcaaaatgcacttgaacgcttgatcggagcctatccagcccatggatttgtgattgaccggaaggaagcaggtgagcttttcactaaggtcggccatccgacaaaggaagagcaggacctgaccgatgctttctgggagttcatttccggtgaagaattctctgaagtgatcttcctcaaaattcccctacctgcagatcgagatgaacatggcgacgctaatggagcaaatgaagggccagaagggcagacccccagcgaagagcaaggcgcagagctgcgcgctggcgtcggagagcttctcgcgtattcagcggcttcagtcggataa

SEQ ID NO: 536992 - DNA, 249 bp, Stenotrophomonas maltophilia
atgagaatcgacatctactccgacgtggtctgtccctggtgctggatcggcaagcatcgtttccagcagggcgtgcagttgctgggcgccgatgcgcctgaactcgatatccactggcagccgttccagctggacccggacgcggacgacaccccggtgccgctgcgcgaggcctatgtgcgcaagttcggtggcgtcgagcgcaccgagcagatcctcggccagacccagaccacggcgcgtgcgtaa

SEQ ID NO: 536993 - DNA, 1140 bp, Stenotrophomonas maltophilia
atgaaccggcgttggatgttcgtgttgatgctggtgagtgcgctggtgctggtgatgccgcgggcgtgggcgcaacggcctccagataccgatccgcctagtggcgtcgttacccaggacattgtcatgagctgggatcgctcagcgatgcccggagatattgagatatgggcgccaaagaccttgatcgcgcatgacggtaccggggcggcgggctacggggagctgtttctcacatgcgcttccgagacagattcattgaccggaaagtgcgccatggaagatacgcatgcgagtgcgcgaggcgttctctccccggtgcctctacgactgacggagcgtcgcggcggaatgcccgcagaagtcacgatcaaaggagcgctgtatcgggttgacccagtcaattggtgcagcagtgactactggcatcgcgagttctacaccctctattcctcctatgcccagacctgtcttggagagttggtggtaggaactggcgcaagccttttactggaagcttccgagttacggcgtctcaccgcagggcattgggagggaacgttagagctcgatttgcgtaagccgccgtcccagcaccttgcgaagtttgtattcaatctcgaattcaccatcaccgactacgacgcgatctcgatctacttcccgaccttcgacaccgtcgcgccgctggtcaatctcgacctgcgctacgaccccatccagaaggtcgtgggtggcaggaaacaactggacatgtgcctgtacgacggcctgggttcgcagagcgagtacctggacgtcacggttcgcgacagcggtccgcgcccacctgcgggatcggacttctcgctctggcaccgcgatggcggcagcgatgccagccagcgcctggactatcgggtccacctggactacggcggccatcgcctggcgatgaagcacaacgtcaagcagcagctgcgcggcatcgacagcgcacagctgcggctggtgatgctgccgggcatcagccagccggtgtactgcgtgcccacgccgctgaccctggaaacaccgcccaccccgatcgccagccagcgccccggcctgtacgagggcgagctgaccgtggtgctcgatgtccccactgccaaaccctga

SEQ ID NO: 536994 - DNA, 1164 bp, Stenotrophomonas maltophilia
atgagagtcgttgccacaagctatagcagtctgaagatgcaagattgggagcccactgcaaccttcaccattgttgctggggagaatggctgcgggaaaagctcgctgctgctggatctggctaagcgggcaaagcgaaggaagcaggatttcatagctatatccggaacgccgcatcaccgcttcggaaaattgcgcgtggggaattcgctactttctcagggtgcgaggcagaggtccggggcagaaagcgtgctgaaatcggcaatgcgacacgcgctcgagcaagatgagctgcagctccgtatgctgtcgaggacccttcgtcattgcggattctggcctgttgtggggattgaagttgtcatgccgacggcgctcgcccctgaacatcttcggcgcatctccgccgacgtacggaaccaaggttggagctctgatgggctgcttcaccttttggtttccatactaaatcactacacgccgggtgatgtgctttggatcgactttgattcccatcattacgggcattcagttgaatcaaactacgccgcgatactggtctgggagcaggagctgaagcggttgggagttataagaggggtgcgcgtccatttgaaaggcgatggtcgagaacatcctctcgcgcaggcaagttcaggcgaactctctctaattacgtcgttggcattccttgcggtttcggcaaaggaaagagaattcgtattcattgacgagcctgagaacagtctgcacccgcggtggcaaagggactacattgatctcttgtatggtgcgatcggatactcgggtgctcaagtagttgtggccacccactcacccctcatcgtcatggccgcgaatgagcttgatgtaagtgtcgacgcgatggtgttgtcggatacctttagcgaccgaatagatgtggatggtggcggccttgagaagatcatggccgaagtctttcatatcttcacgccgaggaataactatctgagcaaagccctcgtgggaatcatggataacgtagaagatggcgctatttctgcagtcgaagcaaaggcgagggtgcgagcaattggagagtctggggttgatgtaattcaagaaaaagttcttgaggctgtcgacaaaatgatcgataagatagaggtgtcaagatga

SEQ ID NO: 536995 - DNA, 618 bp, Stenotrophomonas maltophilia
atgacctatcttgagcttgaatttactgataccgagaaagtccttatcgacgctgcgtggcttgacggtgtgctggactggagcagtgaaagcctggtttcgatcaggtcaaaaataagaaatcatcaccggctactgcaaaaggacagctgctgttactgcaggaaggattttgcggacgatcatcctatggcggtggatatcgaacatgtcctgccgaagtcaaagtataagtatctggcgatctgtagggttaatctcagtgttgcgtgcaagcggtgcaacatgcggatcaaaaaggatcgtcaggatttcataattggaggtttggacttttcttctgaaaacgaagtctcagatccgggaaggtattcgataatccatccaaacttagacgcttacgctgatcacatcagtgttaaatttatcaagttggaggagttgctgctaagacgctatgtcaaggttgactcatccttgaaggcccagtgcactatagaatatttcgatctgagaagccttgaagttgatgaacttgatgggcttcagggcatcgcggaaatgaatgggagtgatagggcaagtttgattcgttctctgctcggcgtgatggattga

SEQ ID NO: 536996 - DNA, 1914 bp, Stenotrophomonas maltophilia
atggccgcttggcagtttagaacgctcaatccgaatgagaattcgggttccagtatttcagatgacaatttttcaattgaagagcggaccaacgtagagattctggttcgtgagactcttcagaacccgttggacgctcgatcttccgtagatgaccaagtgagagtcagttatcggatcgtcgaggtcgatcttacgcatagcacgctcgccaaagcgctgttttctccggagtggatggagcatgcaaaggctggacagcttctgcagagcgcattgcctggcaaggcgcgttttctgctcattgaggatttcggaacgacgggacttgaaggtgtttacaccgactcgtcagtggatggctcaagcgagaactggaatgcgttctggttccgggaaggcgaaggtgcgaagcacgctcgagccaatggtggcgcaggtcaaggaaagataacgctctatttggcgagcgaagtgcgtaccgtcatcgctctgactaagcggaagtcagatggaagggagctgctgtttggttgcagccgatttctgcgcaactaccgtctagatggtaagaaggagcgttgggcaaaggaggctcgatgggggagcgaggcagatcccaacaaacaaggcgctccgatcgtcgataaaccgctgatagagaccctgaagcaggagctgggactctcccgcggtgatgagacaggaactagcttcatcgttccgatgccgcaggacaacctgacagaagacgaaattcgaactgccgtcattaatgagttcttcttcgccatcagccgggggcgccttgaggtagccgttggtcagtcggtgctgaatgagaaatccgtagcagaggcctcagtcgctcatgtcgctggcggccggcaaaccgcgaggttcagggcattcctgcgaatggccgccggcaagagcaagcagccggcattggccgtcgccaagccaagttggaccaaagccaagggctttgatgagtcctcattcgaatccagcgatctgacgaatcttaagggcacatttgagctgggagatccgattgttgttgatcttccattgtcgataaaaacgaagaagggcgtggtccaagcgacgacatttcgtgtgttccttcagtccgacgaagacctggagcggagcgaggagctgttcatcaggcaggatctcgctatcgatggcgaaaagaagttgaagtcagttcgggcagcacaaccggtgctggcgctaacttttatcgatgaccagaatctatctgagtttcttgtgtgcgcggaagagccgacgcatcgaacctggaacgctcagcgtccgaaggtaaagaatgcctacatgacgcccaacgtattcttggctgctgtaagaaacgcagctgcaaaactcgtccaactcgttgcacctgccgggcagcgagatgacacggcgctggccgtctacttcgcggacccttcccaatctgtcaaagtcaagaagggcccaagtggcgattctggcagcaatggaaagcccggcgacatcgagctgattgatattccagcgcccaaacctaagcctgtcagcttcaagccggcgaaggacgggttcacatttagtgcgcgcgcgttgccggactcacctttcgtcccgttggagtgccgcctggagatgggctatgcgacagtccatggcgatcccttcaagctctgggatgctgcagacttctggctcggtgacagcggaaggttcagcatcaattccagtggggtggcggacttggctgtggatggcaacgagctgagattccgcatggatacggatgatgcatccatcgctgttcgcgggttcgatgagaaccgacagctcgaagtacgggtgaagtacaaggaggttgcagatgaagcagatatcgcgcagaactaa

SEQ ID NO: 536997 - DNA, 324 bp, Stenotrophomonas maltophilia
atgaagttccttttcaacagcgatggtcagcacatcgcaaatctagtcaacggccggcttcactctccgaatggccctaacgtcgggcattttctgcagcagtacggaatcttcatagacatgcacggcaggtaccttggcgaggtcatctacaatgaccgcctcatgtacaaccgagcatctccccatcggtcggtcaactttggcaattacggcaactacgggaatgtcggcaactacggcaatccaggaaacttcggatctatcggctctgtaggtgggtatgaagacgttccccttgagagacttggcttaggggtctag

SEQ ID NO: 536998 - DNA, 678 bp, Stenotrophomonas maltophilia
atgaaggcgggcaagaagctgagtttgaagctgatccaagatgaggccgatgacgcgctagcctttaagccggatctgaacgtgtttgtaattgcaactacttcagttgaagacacggtgcttcatcaggcagtgactgctctgaactcttcaaaggtgtacccttttgcgattagttactggagctggaatcacttcaatgacaagctaaatcggtccagtaagttaatggaggaaagctacagaaactacgcgaattcatttgatgtaaatgaacaattgcttgagatggaagcaattttcgaagcgctctctcggcccgccttcattgacgactttgagcatgagttgaattctagcgacttcattcacgcgctaggtgatacggtacttttcctgcagacaggcttgttgagggatcgacttacaggacaactgcttcgtggcgtctatccgtttagcatgctaccggcgggcgagaacaagaagttgcgcaagcgccttcttgatgacgtgagcgaactgcgcaagcaggcgattaaagatcactcagctgggcagctaaacagatctaaggcgccattttacaactcctcgcggcttgctcttatttccgagctcaacaaagcactggtggctcgggggatgagtgcaatcaccccgcattacgcaatttaa

SEQ ID NO: 536999 - DNA, 444 bp, Stenotrophomonas maltophilia
atgaagaaccagaagggcttcacccttatcgaactgatgatcgtcgtcgcgatcatcgccatcctggctgccatcgcactgccggcctaccaggactacaccgccaagtcgaaggtcactgctgcgctggctgacctggcctcgcacaagacccagttcgagatggaaaagagcgccggtcgtgcaccgactctgggcactgctggcttccaggcggccaacacgggttcctgcgagaccatcaccgtgaccgacaccggcatgatctgcgccatccgtgagccgggtagccgcatcggcgaaggtgcgaccttggctctgaactacaccgataccgtgacgaacgactccggcgcaatcaccaccccgggtggctttacttgcgttgtcaccggcatggacaagaagttcatcccgaagggttgcggcgccgccaagccctga

SEQ ID NO: 537000 - DNA, 915 bp, Stenotrophomonas maltophilia
atgaacgggatcgggattgatgtcagcaagcgccaactggatgtcggcacgacggacggagagaccctgcaggtctggaatagcccctccggcttttctgaattggatgattggctgaagaagcgtccggtcagccagatcgtgctggaagccaccggcggctacgagcggccggtgctggattttctgcacgcagcgggccatccggtggtccgcgccaatgccctgcgggcccgcaggctggcccaggggatgggccagatggccaagaccgaccggttggatgcctatgcattggcgcagatggcagccttggtgaaactgcccgcctaccaaccgctggagccttggcagcagaaaatgcgggaattcgtgcgggcacgtcgacaggcgatgcacgcgctgaccatcgcgcggcagcagcaggaaatggtcggtgatcgtgaattgcgccggctactgcaggccaacatcacccgcttgcagacgctggttgaacgtctgggaaagcaaattgccgagcaggttgcccaacagcctcaactggctgtcctgaagtcgatgaaaggcgttggctctggcctgcaggcggtattggcaagctatcttcccgagttggggaagatcagcggcaaggccatcgccagcctggtcggtgtagcacccatgtcccacgacagcgggaccatgcgcggcaaacgaagcatccacggtggcagggccgagatccgccaagtgctttacatggccgccatgtcggccatgcggcatgaacctcgactgcgcgatttctatcagtcgctgcgggctcgcggcaaggaaggaaaagtggccatcgtggcggtaatgcgcaagatgctggtgattctcaacgcccgcgtacgcgacgcccgaagcggaccggtccctgcctaa

SEQ ID NO: 537001 - DNA, 816 bp, Stenotrophomonas maltophilia
atggtccgttcgatgtcgcgctggctgccgctgctggccgtactgatgatttccggttgcgcctcggtgccggacagcgcgcgcgggcatttcgagggccgcgcggtgaaggtggatggcgagaccgcctactaccaggtcttcattcctgccggcgtccgcgcctccgccccgggcagcgcagccacgcagggcgggcctccggtcatcctgttcctgcacggctcgggcgagcgcggcgccgatggcgtcaagcagacctactcgggactgggcccctatctgcgcgagcacccggacttcccggccctggtggtgtttccgcaggcaccgcgccattccgaatggagcggccgcaacaaccgcatggcgctggccgcactggacgcgatcatcgacgaattcggcgccgacccgacacggcagtacctgaccggcatgtcgatgggcggttatggcagctggaacatcggcctggacgacccgcatcgatttgccgcgatcgtaccggtatgcggtgccgtgttcgcaccgcgcgcgaagcgaccgaccctgttcgtcgagcaggtcgcgcacgaagcggacccgtacgcggtgattgcccagcgcctgcagcacacgccgatctggatcttccacggcgcactggatgacgtggtgccgccggacgacgaccgcagactgcatgccgcattccagcgcgccgccgcacgcgacgtgcgctacaccgaatacccggaaggcaaccacaatgcctgggacgccacctacgccgacccggcaatgtgggaatggctgttcgcgcagaagcgctga

SEQ ID NO: 537002 - DNA, 255 bp, Stenotrophomonas maltophilia
atgaatcacaaatttccctggtacgcccttatcagcctggcgctctgcgctaccgtcgcatcgatctccagcaccctgctgtacattgcgggtcgcacgtttgttgcagtggcaggtgcagccccgatcgcaagctggggacgccctggatacgggctactgatcgtcatcgggttcctcgcgctggcgacctggtacttcggcgcgcgcgcgaaggccgcgcagaaggctctgccggtccgcttcttcatctga

SEQ ID NO: 537003 - DNA, 174 bp, Stenotrophomonas maltophilia
atggttggccccgttgccccggtagtcgcgaaccttggttggcgccgcgatacaccgttgcccaccaaggtgggcatctaccggtcaagcggcgtcctggtgctccgcgtcgtcaatcccggggctgactcgccggccaatgtccttcagccgcgccagctggtcgaccattga

SEQ ID NO: 537004 - DNA, 624 bp, Stenotrophomonas maltophilia
atgaccgcggcagacggatgcttcttgtgtgcgccgcctgaggacctcgtgtttgcgagaaaagggggggcttatgccctgtgtggccttggcccgatcgttccttactatacgattgtagccacgcaagagcatgtcccctcttgggctgacgatcattcagatggtggaaattcgctcttcccgcttctatcagaaatacgtgcaatgtttcgacggatggggatggaggttgccgttggagagcatgggagagttcccctatgcgtcgagaccttggttgccgacaggcactgctatcacgcgcatcttcttgtgtttcctgatgtcccccagcagagtcctgagttgttatctaactttggcgtcactgcaaattactccgaatggagtgattctctaggggctaccggccctggcgagtattttctattatctcagagcgagcgctcgtgggatatttgctcggggccaagcggggctccccgtcagttgctaagaagaatgatagctagttcgattgacagaacagagcttgcctcttggagggattatccaaatcgcgacgacgctctccgttacgctaaggagcttcgcgaagagtgggaaaagcgccatggttga

SEQ ID NO: 537005 - DNA, 1191 bp, Stenotrophomonas maltophilia
atggttgataacatcgccgggcacgcactggatttgctatccagccgattctcggagtcgagcgtcgagggaaaagcggggcgaggatgggggcaatttattgatggagatagagggcatacgcagatcggaccctatggaacatctgccggcctgatcgttagtgccctcgcaaacggtcacgttgacctgcctgcgaacaatgaggccgttaaagagctagaaaatgaatggaatttgtacaggaagggcgagagcgagcagctcaagcttttttctcagaacgtgcgcttggcgctcgttctgctagccgttcgaatggcaggtgcgcatttttcgaagtttgcggatgacatccgaagcgaactgatcgcccgccagctttccaatggctcttggggggagtggtgggttagcaatagtgagcacgatgagcgtagtaggacgcttgcttcgtccatggtagttctgggcctctcgctgatggcacctggaaagacgggtgtgtgtgatgtttcggtgaggtgggctcgtaatcagtcgccgttgccaatgtctggcgcgggtaagtcaaagctggattcggtgatgcacacgttggctgttgtggtgaatcgccaagacaatatgagtgagttctaccgcattctgagatcctccgcctggcgagatctaatgcaggagggagactaccttgctgttcacttctatgactacaaatggcgcgtaaagaagcgccttcttcatggtcgcgaatatgttattgcccccgttaatctgttagttggaattgcgacgctgcagtgtaagcagaagacaatggcttcattggtgggcctcgatttggcaaacgccgtggcgctgtcgatggtgtcgaaaaatggactgtatatcgttggcgagggtgctagggcttcttcgctaaatcaggcctgggcttcgattctcgttgcaagcagtgcggtcgatttcgggtcgcaaaattttctgcgggcggtactttttcttttcaagaagcggaagaacaagttttttgataagtggtttccagcgatctctgtatgtcttgggaccttcctctctgcgtgtgcgccagatgttcccgccgcgaagggtacagctgctgtgcttctcgtaattctggggtggataacggctagctcaatcagttcggtcttgcgaaggtcatga

SEQ ID NO: 537006 - DNA, 1257 bp, Stenotrophomonas maltophilia
atgaggatcttcgatcctctttatggtgcattcgacgtgccgaagtatgtcgaggcccttgcgctcgccccggaggtaaggcgccttgggagcgtccgacttctcaatacaactgcgccaactaccgcgacgctaggtgatcttcgccgcttttcccatacgatgggcgtattgcacatctgcacgacctcacggttggcagcttttgacgaggaagagcgaagagctctgatagcgtgcgttctggtccatgatgtgggaactcccccctttggtcaccttttcgagacgttgctcgctgaggagatcggctggaatcacgagagagtcgcgagcgacgttctcctcgggcagagtgtttcctctaatgtcgcgcacgcagtgttcgcgaatagaggtgtcggattcttaaagatccttgggcgaaatggcattgatcaaggtctggtgctcgacatcctctcgaagcgccatccgctgtctgttcttctattcgggactttggatttcgacaatcttgataacgtcgccagaatggggtgggctcttggactagagtttgataagaaatttccttcgcggctcgcatcccagctagatgttacgagggccggatgcttagtgctatcaagcgaatggtcagttgacgttctagaatggcttgcagtgcgaaagcgtgtctacgaggtgctgttttttgacgcaatgacggttgcatctcaggctgtgctgtctagggctgtagggcaagttatgagctcggctgaagtctcggtcgacgattggtcgctgactgatgagcagctgttggcaaaaatggcggcaagtcgattcgttgacaaacgcttgctagattctttttttggtcagcttcccttgcttgcttactgcatccatttgcggtcgggcacggctcttgatactttgacgaggcgtgagatttataatcatattttcagttccttttctgctgatcttaagtctgatgtattgccgtttgttcaaagggataaaagaacgtttggcagaagaatggtttttaacgcgcccgactcactaagtagttggagtgttggtgaggattctagtggtgtcgtggtttatgcgttccttctttctggaagtgttcataaggctgcgagaattgaggcggtaagacgatttctgtgcgagctggagatcgacgagggccaggtgttgcgagtttccattgagcgcgagattcttaatgagatccagggtagcttcagtttctag

SEQ ID NO: 537007 - DNA, 1116 bp, Stenotrophomonas maltophilia
atgaattgggactttgaggggtctcgcagcgagtccgaattttcggcgctgcactggcacccttgtaggttcgtttcgcagatcccggcgggattgattagtttgttatctgatgagggcgatgtcgtgctcgatccatttcttggctcgggtactacattggttgaggcgcagcgtctgaagcggcggggagtcggtgtagagattaatccggttgctgcgatgatcgcttcggggaaaactattccgaagcgccaggctgtaatcaaaagagcacttcacgaattggctgagttggcgcgcgaccagctggaaggggacttgttgaggacgcgcatgcggcagccgattcttcaccctccaacagtgcagatggataagtggtacatgcctgacgttgggcggcagctgagtgtgctttgggggctgctgaatggcttgcggggcgattcaagcaagcttggtcatttggccttctcttcgattcttattagagtctgtcgagagaccagacattggggttatatctgcgacaacactatgccgttgtcgagccggcgggctgatgtcctggttgagtttcttcgctccctgttgatgatcgagcgagcctacgctgcacgagagctttatctcgggccgggcgaacgtttgcggcgggctcaagtaataaatggtgatgcgctggtggagctggcgcgcttgaaaggctcggtcaatcttgttgtaacgtcgccgccttacttcggagtcagcgactacgcaaagtctcagaggctcacagccgaatggatgggtgccgatgtggagcctgtacgtctcaaagagattggggctcgaagtaagaggcatcgtaaggacgcctacgaaagttacatgagcgagcttgttcgcgtcatggatgcttgtcgcgagaagttggttgagggtggcttctgctgtctggtggtcggtgagtcagcctctagacgtgggtacatcgcgcagttgcatgatgctatggaaggcatagggtttcaaaccgtgcatttggttgagcgcgcggtttccgagcagagaaggcagaatcccagtattctttctgagcagattgctgtgtatcggagggttagatga

SEQ ID NO: 537008 - DNA, 1017 bp, Stenotrophomonas maltophilia
atgagtacgcttctggaccttggcgaacgagagattattagaaggtttctttctccgctcgtggatgggttgggcgacgattgtgctcaggtgcaggtggacgctggcgtggctgtcttaacgacagatccagttccgattcctgctgcttacgtgattggtggtgacgacgataagtattgggtcgggtggctactggttgttataaatgcgtctgatcttgcggcatctggttgtgatccaattggtctcctcgccgctatagagtgcccttctgactggagtgttcgtgtatttgagcgattggtagaaggcattagggatgcgtgtttggctcataagatccgatacttgggtggtaacctcaaggaggcggggattttttcggcgacaggcacgggtattggcttgtgtgtcgataggcaaccgctaagtcggagtggagctactagtggtgacttaatcgtgctggtggggaagccaccagcgttctggagggatgctctggctgttcgctcaggacggcaggcggatcgcaccggccctttgtttcggcccattgcacagaacgaggtcatggctgccctcagtcggcaaagcttggttaaggcgtctatcgataactccgatggtttattgccgagtctgcagcagctcgcagtcgcaagctcggtatctataacgcttgatttggtgcagatgcgtagtgggggggcagcagcactaggtgactcggatcccgtgagacttatgctcggatggggcgattggaacatggtttgtgcgattgacccggtgaattttgagcgcgtcaagctggttgcgaaaagcaatgatagcgactgtattgttattggtaatgcggattttggaagtcaggtgtattgggggagtggcgatcataaaactgttgtgccaaggcttgagtccgagcgttttgcgaaagactcttggttttcagagggcatcgacggctatgtctcgagactattgacaatacccattccggaagcataa

SEQ ID NO: 537009 - DNA, 405 bp, Stenotrophomonas maltophilia
atggacaaagcgtatgtgcgcatggatcacgtcgttgggaagcccttctccatcgccattgcggatttccatgcgcccggttcgatggtttggagccgtgtagcgctaatggcgtacctctatgggttctatgcgaaagagttagaggtgcggggcaagcgggtggcggtctctcaagatgtgcatgtcctgcccggcgctcccaagatcccggcgggcttgttcttcactccggagggtgaagagttgtcggctgtgatcttcagccaaggcgcgacccttgcaaagctcagtcgcgtcccttactcgttcgatcttcccgcagacgactaccgttacgtactgtttgcactgaataagctaacaaagtccttcaaaaacgaagatctgaaaatgaatgaatga

SEQ ID NO: 537010 - DNA, 279 bp, Stenotrophomonas maltophilia
atgcacccggatgtcctcggctgggccgcgaccgtggtgttgatcgccaccctagtccgccaaatggtcaaacagtggcgatcgcctcaccccgaagccgtttcgaagtggctgttcgtcggtcaaatgaccgcatccacgcttttcacgatctacagcgctctcatgggttcaaccgtcttcgtcgtgaccaacgcattgctactgctcaccgccgtgaccggccaagtcttggcttggcgcaggcgtggacgagcctggccgccgcccccgtgctga

SEQ ID NO: 537011 - DNA, 732 bp, Stenotrophomonas maltophilia
atgctgggaggggctgccgagcgttatgcaaagaccttgaagaacaagatggacaaagcgtatgtgcgcatggatcacgtcgttgggaagcccttctccatcgccattgcggatttccatgcgcccggttcgatggtttggagccgtgtagcgctaatggcgtacctctatgggttctatgcgaaagagttagaggtgcggggcaagcgggtggcggtctctcaagatgtgcatgtcctgcccggcgctcccaagatcccggcgggcttgttcttcactccggagggtgaagagttgtcggctgtgatcttcagccaaggcgcgacccttgcaaagctcagtcgcgtcccttactcgttcgatcttcccgcagacgactaccgttacgttcgctttggagagctcagcgattctacgcccggtgccttgcgcggggtgccgttctgcatggacgtaaacacagacgaataccgcgcgctttgggctccctacgatcacgagccatggacggcagagatggaggtgttccacaaccccaacgccaaatatccgttgagtcccgcgcttctaccagaggccacgcactggctttcggttgatggcgtgctggactgcaaagccttctttcagaacactgttctgaagtcaaaaaccttgattcaaggcgtagataggcctgtcccgactgtggacgacctggtctttagggatacaaccgaaggcgaagaatga

SEQ ID NO: 537012 - DNA, 630 bp, Stenotrophomonas maltophilia
atgttggcgcgcatcaagcgcccgaaggtggcagcacctttcagtaggacagagaactatgtggtcgccggaatggtcttgcttttcctgctctgtgttgggtgcatacagctggtggaagctggcttgctgtcactggaatcaggcaggtcgcttgcgcttcctatggcagcggtgatcattctgctgggcgcggtctttgctgttgttcaagtcatccaggttgcccagctggtgttgaacggctggagcgacatggccggtcggattgatgtgaatgtcgaacttgactctgctttcgtcgaagatctttctcgttgcgaggcagaagaactggaccggcactccaagctcatcgatcaggaggcaaagtttctctcccgacgtgccgggctggcctcaggtgccagtaccatcagcgcgttggtcatcaatctgctgagcgtcggctcaggaaaccaggctctggagtgggttgatggtgcaaaactgatcatcacctgctgtagcttgggcatgttgattggctcggcaatggtgatgatattcgccggaaagctggagaagatctccggtctgctcaagcttgctgctgagagaagctcactgcgggaagacctcactcggtga

SEQ ID NO: 537013 - DNA, 351 bp, Stenotrophomonas maltophilia
atgaccgccaatcgagctgcccgcttgcagtttgccatcagcgaactagtcgacatcctcgccgaggacctcaccgcccgtaccgtggctgcgatcgccaagcaggagagcatcaaagctctgcccgtgcccgtgccggctcagagcgataccgaaccacggcagcggcgtctactgcggcgtgcagaggttgaggaaaggacaagcctgcgcaagagcacgatctacaagtggatacagcagggaaagtttcctgccccagttcccctgggtgacaagacagctgtctggctcgaaagcgatatcgaagcttggatagatgccaagatcgccactcgagatgcaacttga

SEQ ID NO: 537014 - DNA, 2805 bp, Stenotrophomonas maltophilia
atggctgacccctcagcaaacctacgcgtgcgcattagcgcggatctggccgacatcaggcagggcttgggcaccctcacccggcagctgcgcgaggtacgctcagaggccgccaggccgctgccggcgaagaacaacatcaacgacctgggcatctcggccggccagaccgcgcaggcgatgcggcagctgcctgcccaattcaccgacatcttcaccagcctgcagggcggcatgccgttcttcacagttctggtccagcagggcggccagatcaaagacagcttcggcggtgtagagcctgctttgaagggcgtctcgtcggccctgctgggtatggtcaccccgtataccgtcgcagctgctgcggtcggccttgtggtcgttgcctggtacagcgcagagaagcaggccgaggcctataccagagcgctcgtgctgtcgcgcaatgaggcagccgcgacaaccctgacgcttgtctccatggctcagaagaccagcgacgcactgcaagtttccataggcgcagccgcggaagcggcgcaagcggtcggtgcgaacggcaagatcgccgcgcaaaacctgcaggccgtcgccagcgcggccgtagcgatgaaggaggtcaccgggcaggcgatggaggacaccatcgccatctacgcgaagctggcggaagacccgctcaagggagcgcagaagctcaacgagcaggtcaacttcatgaccgtcgctctgtacgagcaggtaagggctttgcaggagcaggggcgcaaccaggacgcggtgacggtgattacccgcgcggcgtcagacgagacggcgatggctctggccaaggtgcgcgccagccagaatcccgtaatccaggggttcaaggatctttggaaggaagctacgaaggcctggtctgccatgcaggcgagcaccggcatgggaccgcaggcattgcagatgcagcaactgttggctgccaatgctcaggacgtcgcgacaatgaagcggggtgttgcagatgggatgagcgatgcatgggtttatcagtacacccagcgcatcaagagtcggaacaagcagatcaccgctatcgccgtggacctgagcaaggaacgcaaggacgctgaggtgaaagccgcggaagacgcgagccttgactacctccagagagctgacgctatcgccgaatcacaggccagcaaagagcagaagaagaaagcagagatcgccaggatcaccatggaggcggagaaggttcgccgccaggccgaggctgctggcttggtagaggaggtgaagaagatcgaagagcggcgtgccgcagctgtagccgcgatcgagaagaagtacgccgagaagccgaaaaccggtggcggcgcagggtcggcaatgcggggggccggcctgcaaggctacaaggacgacctggtcgcggagcaggcccagatcactgccggaacccaactgctccgggctcagttctcgtcgcgtgagattaccgcagctgagtactacagccgtatgcgggagcaggtgcagaagggtactgacgcgcaggccaggtcgctggagcagcagatcgcctacctgcagaagcaggcggtgagcgggaaggaggctatcggcgtcaaccgccagatcggggagcttgaagcccgccttgcaaagctccgaatcgaaggtacagcggcgctggaagtgctgaaaaatgaggaagaatccaccgccaaggcacgtgcaaatgcggtcaaggcctatgggagcgcgcttgatgccagcaacgctgcgcttgcccggcagctggccacccaggcagggcgaatcggtatgggtgaccgcgagtacgagatccaacagcgcatcaacgatgccatcgcggatgaagcagataagctgagagagctgagcctgcagcggaacgctgatcagattgaccaggtcacgttcgaggaagaaaaggcgctcctgcatgccaagaccctcgaccgtctgcagctgatcaaggaaggctacgagggtctgcgcatggccgagggcgactggttggctggcgccggcgcggcatggtctaactaccagcaggaagcaggaaactacgcccggcaaatgggcgacacagtcacctccgtcatcggtggttttgaggacgcctgggtacggttcaccaccaccggcaagctgagcttctcggacctgacgaagtcggtgctggctgacctggccaggatccagatcaagcaggcgattgtgggcatcggcaatgctatttcgaccgcctggggtggcggagccagtgtgtataccggaaatggcacgggcgctggttcgctgggtggcttcggcaacaacctgggaaacgccagcaccagtagcgtcaacgacgagctgttccagcgcctcatccggaacggcaaggccaatggcgggtataccggcgatggcggcgtcaacgagcctgccggcatcgtgcacagaggcgaggtgatctggtcacagcgggatgtcgcgcgcgctggtggcgtggagattgtcgaggccatgcgccgcggtctgcgagggtacgcggatggtggcgtggtgggtgcgccgcgcgctgctgccgcggcaatggctcgagggggcgtcaacgtctacatcgacggggccaaaagcgactccggcggggtacaggcagagatgggcccttccggtgacctcgatatcagggtctccctgcgcgagctgatacggggcgagatccgcggcggatcgttcgacaacgacttccgcggccggtatggcctcacctacagggggaaccgaggtggttga

SEQ ID NO: 537015 - DNA, 471 bp, Stenotrophomonas maltophilia
atgaaaccgcttgaaactgttcgtccatcctgcaaagccttggagttccggggggaagagttgctcctcgcacctctccgtctgcagcagatcagccccgtcatttcagccagccgcaccatcatcggccgcgtggcgatgatcgtcggcgttgttgaggatgtgcctgccagtgctgcgggcgccatccttctggacctgctggagcaggacagcgccgatctcgccgcggcactggcggttgccatctgccccgaaccggagtggatcccgggcccgggcttggaagaaacgctgagacagaaggcagcatggattggcggcggcaccttggacgaggtggctgacctgctttcagccgtagtgggcctgaaccgggagttcttcacctttcgcatgcggagcctcctgctgcaagcaaaggcgccggcagaagagaacccggacccggcgacgtcgtccaattcctga

SEQ ID NO: 537016 - DNA, 453 bp, Stenotrophomonas maltophilia
atgaccgactacttgcccaaggtggcgcgggtccgcgcccagattgaaaagctggccgacgaaatccgcgaactccgcgacggcatgccgccgaaagaagcagcgcttgcagccgtggatgctcacatccagcacgaggccgcgaaagttgccatccggccgaatgccttttttggcggtggcggcgacgccgtctcggcctatcccgacagccctcatgcctacgcgtgcatgttcttcccggacgttatccgcgatcgcctccgcgcggaagtcgaggccctgtatcagggcgaggtgacgatcgcggatgaccgtgagaagggacgtctggagcaacagctgctggatttggagcggcaagaggaagcgtttatccgccaggccgctgcagagggcaagagcatcccacgccgtgatgacgttaaccctgtcgtgctgctggaagactag

SEQ ID NO: 537017 - DNA, 414 bp, Stenotrophomonas maltophilia
gtgagcgatacatctccgcccgtcccctcctccctgctgaagctggagcacctacgaattcgcaatgacctctactttgccgcgcgccgcgcgctgagcgagcggcgcagggagctcaacgaacagcgaaagtttattcgccaagagatggataccgcctccaagagcttcagcggcagacagcccgagataggcgttggcaggccgacaactctcggtggcaaaaccttggacgaacatcggcacgagacgctgaccaagttgaaacgctggatggctgcgatcgatgcggtggacgccgtagtagccgccgcatacgacgaactcagcgcttcgtccggcgatacaggggcttaccaggccgcctcaaagcatctccaacagaccatggccgattggggccttagccagtaa

SEQ ID NO: 537018 - DNA, 666 bp, Stenotrophomonas maltophilia
atgccgatggcgcttcctgctcggccacagccttgtactgctggccacctgcactactgcgccaagatgatcgaacgccactgtcgctggggcagctggcgcgggagccgttgccaaggccgtgggcgggaactgcgagcaccaccgacagcgttgcacgccacattgtttcacgacacggggcccctgggcttatccacagccaccggggggaattcggaccccggtaaaagacagtatttcggcctccagggtgctccaccacaggtccgcagaatgcgggggtttccccgagcaaaacggacgattcacgcctgcgcgccttgtgcaaaaccccgcctcaggccggcggactcaatgctcagctcccgtttccctaaatcgccgccaggaagtgcgcgttcctgcgcattccagccctgccgtgcagcggcggccagcgttcaatggtcactgcctaagagccatgccgtcatgccgaaaatcgagctcgatctaccccaagtggtttgcgacgccatgaacgacgcggccagtgccgccggtatccctcctgccgagctcttggtcgatgcgttgcgcagcctacccgcgttccagcgtgccttggcagccaggcccgagcgtcttccagcgttttcccctcaaccccggagcaccccgtga

SEQ ID NO: 537019 - DNA, 273 bp, Stenotrophomonas maltophilia
gtgagcggccacgaacaggacaccagcgccgccggcactccggccacagtcaacgaggtccgccagcgcttggaagtggaaggccactatgtgacgatcgatggacgcgttacggaagagacggcggccacactggtcccgtgtccggtgagccgtctacggcggtggcgacaggagggtaagggcccacgcttcttccagccagcgaagaaaccgtggtactacattggcgacctgcttgcgtggattcaggccggcgaaggatttcgctag

SEQ ID NO: 537020 - DNA, 249 bp, Stenotrophomonas maltophilia
atgcgggtcgaccgcgcgctgcagggtgtccgtgcgatccacgacctcttggccctgaactttcagcgcaacaactctattcgctatcacggcgacgaagcgtcctgcgccttctctggccttacggatagccacgaggaagggctgtacgttgccatgcgcgtgctacttgatactgcggatgttcccattggcgagctccgcgataacgccggccgctgctggggcggcaaggggggcgccaggtga

SEQ ID NO: 537021 - DNA, 687 bp, Stenotrophomonas maltophilia
atgtgccattccgccattgcaacaggtttttcaacctgcgaaaatccgctcatggcaaccatccccaaaaaagcaaagaagcggccaggccggcctcctaagcaccagtcagacaagctcgaacagttcagtattcggcttccgccgaagctcaagttcggcctggagctcttggcacgcgcgcagcaccgttccctcagccaagtggtggaatgggcagtgcagatggggatgaactcgtacgaagtcgggcgcgacttcgaaagtctcacagacctcttgactgccgcttggagctatccagaggaaggaaggcgtttgctcgaggtctataggtctgccccagctctgctcagctacgaggatgctgcggcttgcgagctcatagatcgcgctgtagacctattggacttctctgagcatttccagaacgagctcaaggctgacccgcattcgaaagacttgagtacggacgagttttggcagcgagtgcgccaagaggaggaaacctattactggcccgtgatctggaagaactgggaccggttgaaggaactggcggtcgagctgagcaacaacgggaaaggcctgcgccttctatccatcgagcgcttactggatcttccggcgcccaagaagggagcgtccattctggatatctaccgtttcgcagcgagagaaatttga

SEQ ID NO: 537022 - DNA, 750 bp, Stenotrophomonas maltophilia
ttgagcgaaggtgagaaaactgcgattgcatttgtctatttcatcacgaagctcaaagaaaatggaaataacatcaaggatacgatcgtcgtcgttgacgatccggtctcaagctttgattctaatcacttgtttcacgcctactcgtttttgagaacgcaatgcactgaagccaagcaactttttgtgctgactcacaacttcacttactttaagctagtgagagactggttcactggcaccaataggaatcgagtcaaaaaaggcaacgccgagaattgcttcttttatcgcctggatgcgccacctggctcccctcgtcactccctacttgtggatgccgacgactcactcaagaactacggttccgagtaccactatatcttcaagaagctctacgaatatagggcgcacacaacactcaatcgagatgaggcgttcttgaccgccaacctcgcccgaaagcttgttgaatcgtttttcaccttcaaatatccaaggcgtcgaagcgacattagtcaattgatggaggctggcctaaaagattgcaccatcacgacaccagagcttaaagaaaaaatctaccgctttatcaataagtattcacatagcgacgttattgagataacagaggaatccgcagaaaacttggcaggcgaaagccacagcgtcatcgggaacatcttccagtggctggaagaggtggacaagaaacattacgacgagatgattcaggttgcgacggcctga

SEQ ID NO: 537023 - DNA, 222 bp, Stenotrophomonas maltophilia
atgaccaacgcaaattcccaccccgccccccggctgaaggtgcaggacgccgccaactacctcggactgagcaagagctcgctggacaagatgcgcatggaaggtcgtgggccccgctacctgaaggtgggtagccgggttttctaccgcgcggccgatcttgtcgcctatctggactcggccgtagtggaaaccaccgacagccgcgccggtggcggctaa

SEQ ID NO: 537024 - DNA, 240 bp, Stenotrophomonas maltophilia
atgaacatggtactcacccccgccgtcaccgcaacccggtcgggccaatcgcgtaagcgcatcccgaatgtcctggatgccctccccctcgatgacctgatgctctcgctggtggtgctccgcaccgagcgtcgactccggcaggcctggcgcaaggcctacaccagctccccgaacctccctgcagcccgcgtggctatggctgagatcgtcgcaatcgccggagggttcaacgcatga

SEQ ID NO: 537025 - DNA, 387 bp, Stenotrophomonas maltophilia
atgaaagcgaccgcacagaccaagttcctgaaggccgtccagaccgtcaccgagccccctccgagtgcaaaagccccccgtcacaccgaacactggtccgatgaaatctggcggaaaaagaagctggaagacagcatctccagccgagttggaagcattgatcgtgtgctgcaggcggtgaccggcctgcaccgcgttctgctgaacgacgaacgacgcgctgagtggtcggatggtattcgtgaatcagctccttccggcctattgcccagcaacatcgaggatatccacagcgccatcgagctgctgctatggcaggcagagaaaacgatgttccagttgcgcgaagaccctggcgtctggggcgacaaagagggtgcccgatga

SEQ ID NO: 537026 - DNA, 192 bp, Stenotrophomonas maltophilia
atgagcgcctcaaacgtcatcccgttccccatagtgggcggccggcgaaaattgcccgagatgcgatcggggcttgatgcggcgcttgcacgcctgatccagttgggtaaagacccgggaagcgccttcgcccagcggttgcagcagctcgatgcagttcgtgcctgcaccaccagcagggggaccgcatga

SEQ ID NO: 537027 - DNA, 210 bp, Stenotrophomonas maltophilia
atgagccgccgcagcccctcctactcggagcgcatcgccggcgtggccagccacaccgaggcgatcttccagttcgccgcatgggccacccggcggcggcgcgcaccgtccatcgctgaaatcgttgagcgttggggcatgtctcgggcctcagcctgcaggtaccgcaaggcgctgatccgtgccggccttgtccaggaggtgaactga

SEQ ID NO: 537028 - DNA, 219 bp, Stenotrophomonas maltophilia
atgtcctaccaacccattcgctgcctcacagcccgccagctgcgcggcatcccgcgcacgcacctccagcgctggctggataccacaacgactgcagaggtcgccttggataccctgatcaccatggggtgcaacgcaccccagtacgccaacgaccgcgccgtgtgcgagcacaaccgaaagctgctgacgaagcagctctctcggatcgccgtctga

SEQ ID NO: 537029 - DNA, 210 bp, Stenotrophomonas maltophilia
atgtccaagacacaacgtagccagccaggcctgcagtttccagacgccccaaaggatgccactgccatcgtgcgcgccttcgatgcagccccaaccgtcgaggtagtgttccgctctgcggtgggtgcgtgcatccccttcaccgtcctgccagcgcactacgtgggaaagaaggtgcggatcgtgatcgcagatggcgcggatgactga

SEQ ID NO: 537030 - DNA, 567 bp, Stenotrophomonas maltophilia
atgaaaaggcacgcgccggccaccacctacaacctgaccgatgccagtgacctgggccggtgggaacgggtgcattactaccagcccggtgagctgctgtccgcaatcctctggagggagttcgccgaggtggagcgtgtgtggcacctcgacccggctgtgctggaggcctatcgccgggacctggagcggcacaccgccgcaatggacgctttggagcggatcatcggcagccagctggcggccctcaacgatccgacatggctcctgcaccggcagtctgcggccgtggtgttggaacgcgcacagctcgaaccgcggctggaggcggcgcgcaaatcgatcacggggaactccaagggcggcctgaagcgggcgaagcatgctagggcggagaacgccaaacgagatcgccgaatgctcgatgttgcggaggcagccctcagaaatggcagggataagcgggaactggtcagccttatagccgaaggcttcatctatatggggaagcatgtctcaaagagcaccgccaggcgcgttctgaagaagcacaagctgatcgactag

SEQ ID NO: 537031 - DNA, 468 bp, Stenotrophomonas maltophilia
atggacaacggaaccacaccgacgaacaccgaccgtaacaacggtgccactacggcgccccgcgacagccgtgggcgcttcgggcagggcaacgctggacgccggcctggctcgcgcaacaagaccacgctggccgcgatggccttgttggacaaggattccaagcgcctgacgcagaaggccatccagatggcgctggccggcgacgcagcggcgatgcgtctgtgcatggagcgattggtccctcccacgcgcgagcgcgtgatccaggtggagctgcccatccccgagacgcctgccgatgtgcccgccacgatgcgcgccatcctggcggccgctgccgatggaacgatcaccgccaccgaggcggagaagctgggtcgctgcgtagagaccttcgcgcgcgcccacgaactggccgacttcgatgcgcgcctgcgcgccctggaaggcaagcatgcgagctga

SEQ ID NO: 537032 - DNA, 333 bp, Stenotrophomonas maltophilia
atgcgagctgaccgctcccgccgcctggcggtactggaagcgcgggtggtgaccgccgcacccaccgccggcgacatcaccacccaggccgctatcgcgctgctggtggactctcacgggcacctggtggattcccgcttcaaggagcagatcggcgacggccgcgtctatggcgtagccacggcgagagaagccgcaggcgtggtcgtggacttcctggaagccgtcgaagtcgtggaccccgatgcagctgccgagttctggcgcgcctccgacttctgggacgaccgcgacggcggcgcccggccggccaactcgcgccgacgcacttaa

SEQ ID NO: 537033 - DNA, 810 bp, Stenotrophomonas maltophilia
gtgagcacatccaccgcatttaccgaccgcgtcaccgtaggagcagcacgccgcaccgtcgatggctacctcgtggccgatgccaaggtggcccgcaccggggttcaggaatacctgggcagcgaggtgggccggcctgacatggcagtggtgcgggtctaccgcccggccgaggaggtcttctcggacgcgaccatgaagagcttcgcccaccgtcccatgaccaacgatcatccgccggagcacgtcaccgccgacaactggaagaagtacgcggtcgggcagaccggcgccgaggtggtccgcgatggcgagttcgtccgcgtgcagctggtactgatggacaaggccaccatcgctgcctgggaaaccggcaagcgccagctgtcgatgggctacaacgccgagatccacttcgagagcggcaccacgcccgatggccaggtctacgacgcggtgcagcggaaaatctccaacaatcacctctcgctggtcgacgcggcacggggcggcagccagctccagatcgactccgctcccaaccaggcggcggacttcctcaagcagctgacggacggcgggctgagcgctgcggaggccggtccgctggcgatccagcttgcagccaatgctgctgctggccagcgcattctggcgaaggcaacgcaagacgccgcggtggtccgcgaccacgctcagcgttacagccagtcccacggcagccgcggcgtccacgacgcagcagccaaccccgccgctgctgcctacgccgagatgtgcgcgcagctgcagcacggcggcgcccgataa

SEQ ID NO: 537034 - DNA, 636 bp, Stenotrophomonas maltophilia
atgtctatcgtcgaagagatccgcgcggagatgagccgcggtacgccgctgacctcgatggaggccaagctgctgatcgtgaagctggcgccagagatggcgcgcatcaacacccggtggtcggagatcgctgtcgccggcccgcgcagtagcaaccatggtcccgtttacaagagggcgctgaccagcggcacccacgaagaggtggccgcgctgcagcaggagttcgaccggctatcgatcgaccgggaccgcgtgcgatccatccatgacagcctccacgggatccgacaggagatggcgatcaaggaggccagcgaggcgctgcccgctctgcaggaaaagctggacgccagcatcaagcaggccgaggacatgcagaaggcactggagcgcagcttcgacaccctccaagacgcctatgtggccgtggtccaggcccgaggcctcgcccaccagggcggcttgccaatggctggagccaagcccgacgtggttcaacggctgatcgccctgagccccctgtcccagcagaaccggggcgcgctttcctggcggccggacgtccatgtcgacaatctcggggtcgaccgtgaggaagcacgggctgccgcacaagcagggtggcacgcatga

SEQ ID NO: 537035 - DNA, 237 bp, Stenotrophomonas maltophilia
atgagccgggcgcgcgtgatcatcgatgccgcccgcatggcgccgggtgtggacatccacgacgatgagagcaacgagagcattcgtcggcgcgccgtgaccgcggtgatgggctccgactggacggacggcagatgcgacgaatacgtggccgggctcttcgacatctgcgtgatggagaagcgcgaagccccgccgatcccgatgctaccggccggtaggcccaggcaccactga

SEQ ID NO: 537036 - DNA, 465 bp, Stenotrophomonas maltophilia
atgcatattttcgtcggcgatgccgcgttccaggcgcaggcgacggaggaacagctcctccagatggcgtttgtcgccacgaccgccggcccgcagatctggatcaggcgacagactgctgctggtcagaacttcgcccagatcagcttcagccccgccgaggttccgcatggagaggtggcgcagatcgcggcttggcgcacagcagacggcttcttcgggcgaattcgaagtgccagcaagaacgtccccaagggcgtggccaggggcgcgaacaacacggcggtcctctccgacaaccagatcctcttcggccgagcgtctatctcttcgagcaccgccaagacgaccagccacaccatctaccgtggcatgttcgagaaccttgatgtcagccaacgcgatgccgcggcggtgctggatgaagactacgcacggaacgttgccggcagcgcgttccggtaa

SEQ ID NO: 537037 - DNA, 735 bp, Stenotrophomonas maltophilia
atgttcggcgatgacgctgccgtcggccgggtcgaggatctggccgggcttggccggcaggtaacggccgaggaattcacggaagtcgcgctcaccaatgaagcagatgccggtggagtccttcttggcgtgggtcggcaggctgacgtcacgtgcgatccgccgcaggtcggtcttttccaggtcgccgatcgggaacagggtggccgccagctgttcctggcccagctggtgcaggaagtagctctggtccttggaacggtcggcaccgcgcagcagcagccactggtggccgcgctgggcgacgcgtgcgtagtggccggtggcgatgcgttcggcgcccagctcgcgggcggcatccaggaagtgcttgaacttcacttcgcggttgcacagcacgtccgggttcggcgtacggccggccgcgtactcggccaggaagtgctcgaacacgccctgccagtattcgctggagaaatcgcggaagtggaacggaatgccgagcaggccgcagacggccaccgcatcgcggcggtcgtcctcggcacggcagtcgccgctgccgtcgtcggcccagttctgcatgaacagaccggctacggcctcgccctgctgtaccaggcgccaggcggcgaccgaggagtcgacgccaccggagacgcccaccatcacgcgcggagtgctcatgcgacctcccggaccagggaaagtggatggcgctggccacccaggtaa

SEQ ID NO: 537038 - DNA, 375 bp, Stenotrophomonas maltophilia
atgagacgggcgcaattgagcgttgccgcgatcttcacctgggggggggggggctgccgcaacgcgcgcgcactgccggccgtggggccgctgcagtccttcctgcctgtcccaatcatgaaactacagccgcttgcgagcagccgcatgagcgaactgcaatggagcgaggtcaaacgcctcctgccgcccgcgttgcgcgcacgcgtggacaaccggggcgacgcctatcggcaattcatcgaggccgtattctgggtcgcgagagggaatgcaccctgggccagcatccccgaagaagcggggccgtggtggccgatccacgtccgttgtgtccgctgcgggcagcgttgtccgtatccgccgcgggactga

SEQ ID NO: 537039 - DNA, 264 bp, Stenotrophomonas maltophilia
atgttaaccgatgggtttctcgacgtgacacgccgcagcactcagaagctggccggatatggcggcgcctcggggaatgtacccagtgggcgtttaccaactgggatcagggtgctcccgttcgccgcggcggtggtcggctgtgtcttgctcgcgctcgtcacaggcgaccccgccgcagcccttatgcgctcggtggtcgaattcgccgacagcagtacgccgaactttgtccgtttcacgggccggcccatagtggcttag

SEQ ID NO: 537040 - DNA, 1026 bp, Stenotrophomonas maltophilia
atgggctatgagcccgtactggccgagaaggacaatatcgcctactcaccagactcgccattggatgagtcttgctcccgcgaggcccggaacagtgatgtgtatgtgctcatcattggcgggcgttatggatctgaagtaagtagctcgcgaaccagcgaaggcaatcaaagagagttctttgatcgatacgaatcagttacgaaatatgagtacatcaatgcgctagagcgcaatattcctatctacattcttatcgattctgccgttgatgctgaataccagacttatttgaaaaacaaaagcagtaaagacatacagtacgcacatgtcgattcgataaacgtcttcatcctgattgaagagattcggcaaaggaagcaaaacaacccgataaaactgttctctcgatatgcggagatcgaaaactggcttcgcgagcagtgggccggcctgtttcaggaattcatacaccgcctatcggccgcccagcaaattcatgatcttagcacgaagatcgaagagcttggacaaaccacagagaccttgaaaaggtacctggagcaaattgtcgagagtgtatctccgaagaagcctgatgctcttgaaatgattaagcaggaaaacgcacgcttggtggaggcaaggcgcgacgcagagctgttgagttttggttacgtcaaacatataaatgtcgcgcatggcgtcgacctggagtccattcgcagtgcattacggcagagcgataagtattcgaggtttgtcgaggttctctttccgaagggagggccctcgtgcctgggcatgggtaaggccttttcgcagctaaatgaggcacgtctattccttgacttgcccccatttcctgaggcagacctcgatgcgattcgagagcagattcgcagccctagaaagttgactaggaaggcgcctgaggaaatcgtggcgcgcaaacccccggcagcgcgcaagccggcagaacccaaggcatcttctagcaaacctcgaaaggccaggcctcattaa

SEQ ID NO: 537041 - DNA, 399 bp, Stenotrophomonas maltophilia
atgctgatggccttttcggccggagcctcagctccgcctattgaatacgagaaggtgggaatggtcggtgtccaaagagtgacggggcaatgggtgcgttacatcttgctcgcggaggactcggcttgcatcacggttcagatcttcaaaggcgcgaacatggaaggactcgttcgccagaagacaatctgttcgctcggggagatgcactttcaccgtgacttcgcgcttgtcgacgtgtggagggtcgactttgagccagaccgactatcactggagatcgaattcatcaaacttcgcggtagcggccatgaagtgagaccttgttcaattgaaatcggaaataggtctatcggagatctggaatgttcactcgagtatggaagcgtgtactactga

SEQ ID NO: 537042 - DNA, 483 bp, Stenotrophomonas maltophilia
atggcaaccaagaaagctgcgaagaagaagcccgccgccaagaaagcggtgaagaaggtcgcgaagaaggctgctgccaagaaggcagtgaagaaggtcgcgaagaaggcgaccgccaagaaggcagtgaagaaggcggcgaagaaggtcgccaagaaggccactgcgaagaaggcggcgaagaaggtagccaagaagtccactgccaagaaggccgtcaagaagaccgccaagaaggccaccaagaagactgccaagaaggcaacggcccgcaagccggccaagaaggtcgcgaagaaggcgactgccaagaaggccgtcaagaagaccgccaagaaggcagtaaagaagaccgcgaagaaggccaccaagaaggctgccccgaagaaggcagcgaagaaggttgccaagcgcaagccggccgcccgcaagaagaaggccgctccggtcgctctgccggcaaccccggcgccgctgatctaa

SEQ ID NO: 537043 - DNA, 465 bp, Stenotrophomonas maltophilia
atgagtgcccggtcgagggcgggtttggtcatcagatcactacgcattcggcttgggtcgtttgctgagggggtcgggtatctactcgcctcggcagtggccttgctcgcagacctcggaaccttcgcgttgctttcgtggtggtgggggggctggtattcagctgccgctggcggtttcctggtggggagcgtggtggcctacgttatcagcgtgcgttgggtattcgctcggcgcgtggtcagctctgcttcggctgaattggccatattcgtgctgattggttgcttcggtctgctggttgtccaaggcgtgatgtggggctgtattaagtggtttggtttgcccggtggcattgcaaggttggttgcggtcggattctcgttcacatcgaatttcgcgttgcgtaagttgattcttttccggtcgcgggggcgcgaacgggccatcggggaggtggcatga

SEQ ID NO: 537044 - DNA, 969 bp, Stenotrophomonas maltophilia
atgaccaccgagaagaacacctcccccgtccgtgaaccctatgacgcgatgggcccggtcgacgcccccaacccgcctgcagcgcgcgccaccctggcggacgtgcagcccggtgggagggtgaggctgggggataggcgtgtgaccgatgcaatggtctatgcggctgaggaagcctacgcaaacagcaagtcggacaatctccacgagagcttccgcgatgcgattgccgccgccctctccgcccagccctgcccgggtggtcaggatgcgttgaaggcgctggttgcgaggtggcgtgcggaagcggcagcgcatgagttgaacggcctcgaagcggattccattggcctaaccgtagccgcaatgcgcaacgacgcacggcatcacgtcttggaagcaacagccgatgagctagaagcagccctcgccgcccgccagccggtgggggagaaccctgcgtggcgcgacgaactggtgcgcgaggcatacaaccgtgggcttgccgatgggttgaatgcagatcgccagccggtggggcaggagccggtgggaactatccgtgaccgcgacggggtgttcgagattgaactgagcgaatcggcccacgataccgacgctggtgcgcttgatggccgtgcggtctacctcgccgcccgccagccggtgggggagccgttcgcctacacgcgcgccacgaccgtcgtggacccgctgcctgtcatcaccccggccgagtacgctggccttcgtgcgcagggccacggcgtcgggatgcgcgcactggtgttcgctgacgccgccccgcccgcgcaggccgtggacctgggactgcagctggatcgctacgacgccggcctgctcggcaatggtggcggcggcgacgtcaactggtggcaggactacatccgcgccgagctggatcgcgcccatgagttctaccaggaacaggccgacgcccatggctga

SEQ ID NO: 537045 - DNA, 621 bp, Stenotrophomonas maltophilia
atgcttgaggacggcaagcaagctttctggttgggctggagggcctacgaaatggtaagtagtcctcgttcctatgactgtcgccttgtgcacctcaatcgaatctttaatgcgattcgctgcatccgcgataccccgtgtgtgactgatcatcgttgcgagatctgccccgaccaagtccggcagcgtgtggattctgtcctccactcgttcagcgctagccagaagcggaaccgcaatctcctcgactgcgaagagcaaaccgtgagcgctgtaccgctctggttccaaggccctttccaggaccctcaccaaccgttgaagacggctggggagcgctgtggtttcgttaaagagaagtcgaccgatgatgcgtgcattcgcctcgcgagcatccaccgcttcttggtgctgctgctgagcaatatctttggcttcggccgcgatttctgccgctcgcttggatgtgcgattagccagcaccgctacacgaattgttgcaccggccgcaatggcgccgacgaccacagccacccaatcggccaaattccctacctcgtccgccagcggacagaactcaatcgccatagaccctccctgttggagccgattctgccatga

SEQ ID NO: 537046 - DNA, 855 bp, Stenotrophomonas maltophilia
atgaagatcatgcagatcacgatgtgcacggcgctcggcaatgtcatggcgagcccgcagtcatacgagaacgacctgtcccgctggtcgaaacccaaggcagcgtccgtcgcggcgcatgccatgcagcagctggccaaggcattcgaggccgacaaggcaacccacgagtcgaacctgccagcgatcgagaacaacctggccatcgtcgagcggatcacctcgctgatggatgacatcgggatgccgaagcgctggagcgagcgtgacagccgctcgcggtctcgctatcccaagacgatcagccacgacgctggatacctcaccgacctgcgtcgcgaggtcaaggtcgatgatggctggacctaccgccagcagcagcatgcccagctgcttgagcggtaccgcgcgtacgaggcgcaggccgctgaggcagacgcccgcagcgctgcggcggccgagcgggagcgccaggctgaggtcgagcggcggaaggccgacatggagctcgcagcgatcctcctgcggtacgagctgccgatcgaatcgagctgggccgacgtgctggacgcgctccgtagccgcaaccagcgcctcgacttggcggtggccatgcagcagacacgctgcgactggagcgagggcccctggcgagtgcgcaacgcagtggaccgcttcaccatggagaccgatgaggacaaggcgatcatcaacgatgtcatcgacggcttgaccgacttcgaagatgggcgggtgtttcgcgactgcacctggaactacgacgccctgttcggcagcgtagaggatcagcagcttgcagctgacgtgcagctcgccttggggaacgcaacatga

SEQ ID NO: 537047 - DNA, 564 bp, Stenotrophomonas maltophilia
atggcttgcattaccagccgccaaggcggcgctcagatagatggcgattgcgacgtcatcatccagatagcggtccaggcgctggtcacgttcacggaagtggtgctgctactggccgggcgctgctttgtgctgggaacctggacggagtccagcagcctgctctggggttttttcctcgcagtactgctgggagcgggactggccctcgctgcgaacaaggattccctccacagggttctccgtcgtgcaggcttcaccacgaggacatcccacccgagcgagtggtactgcgtactgggtacgcgtcctgccttcgtggtgctgcagctgaaggatggccgtcgactgaccggctaccccaaggagtggccgatcagtccggcggcagggcagttctacatgcagatgccggcctggattgtggacagggatccatcagatgcaggcgctgatccggaagcagggcctgcaatggtcgagctcccacagctggatggcatactgattcacgcaaccgacgtgcaatgggtcgagattctccaggagacagacaatggctaa

SEQ ID NO: 537048 - DNA, 1008 bp, Stenotrophomonas maltophilia
atgggctcctataagtcgcctgcaaaacagcccgcaccagtagacccgttgtcactggctgctgagcttcatcgccgatccttcgaaaatctcgcccaagccaccagtctcgacgaagaagcattgacggcctgtttcctaggtggacttacaacatcattctctatcgtcgcagcgctatgccacatcgaccccaacgcgactccccccttgtcctggacgcaatacaggaaaaaggcgggcaacgagaagctattgaacgaatctgacattggagctgacttcgccatggtgtgctggaggccagatcgaaaaatgcgcattgctctgtttcaagcaaagaatggtcaatgcgaggtggacgaagaggacgcaaaccgcgaagaatggaagctaaacgttcaccggcgcccgaaaaagcctgagccagacaccccctggcgagaagcgcaaatggttcgactcgtcagaacttcaatcctcttcgaagaagtgcgcactagtagcctgagcactggcctgcctaaaattatccaagaagcccaaaccaaggcagacaatgcgaatgacgaggaactaacctcccattgcaaaaacgtaaaatggataaaatacatcggctactttaatggaaaggccgtctgcatccccatctccaacatatccgacgcactacccaaagaactcgaagaaaaatcattcacgcataactggatcacacttaccgacaaatcctcccccacggactttgcagaaaccctcacccatggacttggcacagatgactcttggctcgaactgaatgaggagactgggattgccctgctacctagccttattgacctcatgccaatatatgttggccgctccgggggaggaaagaaactggagataaagaacgcagtagctctgtcgctcacaatcaatcagaaatttcagaactcactgaagaatgaattcgatagattgagagagatatcgccgcaacctaccccgacacatggataa

SEQ ID NO: 537049 - DNA, 219 bp, Stenotrophomonas maltophilia
atgtggaccttgttcaacgtggtgcgctggctcattaccggtgcggcgctgtggtggctatgcagtgtggtgtttgaggagggaacgactgcagatggagcgctattggggttgatcttgttcgggcaacttatcttctggcccctcttgctgctctgggggctgccgtggctcctgcgtcgccgcttggcccgaaggaggcgccaatcgatatactga

SEQ ID NO: 537050 - DNA, 300 bp, Stenotrophomonas maltophilia
atgaagaagttctggctcgtttccgttgtagcgctgttggtagcttgctcaggtggtcctggtaaaagcgatgttgagaaggctttggctgtctacttcaagcagctaaccgggaccacgatgacgtttgagcacttgaaggtaggcgagtgcgtgcggggtgacggtccaggctatgcctgtagcgtcgccggaacggcgcaataccagattgggactcgtacgcaacagcagcagcttgctggcacgttcgtcctcgacaaggtgggtgacacttggaccgtggtggaccgtcgctaa

SEQ ID NO: 537051 - DNA, 687 bp, Stenotrophomonas maltophilia
atgtcggctatgttgttgcttggggccgatgcctgggtgtgtagagctgctttctacctactcgcagccgttgctcttaacaacgcgctgccgctaaaaaacagcatgaggccaacgccaattctgtcaatgcccccgaagaatattcgggggcattgttttccaaccccagaggtacgaaaagtcgattacgccttaactatcggggggcagctgtgtcagaaaaaaaggccccagagtataggggccaacccgatgaaaatgggaagaggaagaaatacgaaaagttactcttcggaacttgcaaatcactggaccatcgttggcgggtctacagttactctgccgcagcaagaaccgccaccgccaccggtaccgccaccaatccatccaccaccaccgccaacacgaccaccgccaccgccaccaccgccaccacgtgcggggggcgggaggatgttcgacacttccttgccggagtcgaattgttcaccgcgccaagtgtactcaacacaggaaatgccattgcagacggtaacgacatcgcctaccaaaattcggtcgggtcgtgaaacattccagactttccctcttgtggggttgcggcgatctatctcatcggaaagaagtttacttgtcccctcatctggatttggcgtgcttaaagtgcatcctatagggcactga

SEQ ID NO: 537052 - DNA, 582 bp, Stenotrophomonas maltophilia
gtgcgcattgcatcggtgatggtggtgttgaccatttggcttggagcgtgtggcgaggccgtggcgaaggccgattcaattccgcccaccggaaccaaacagggttgggagcgccagcatctgggcgaccatgtcagcgaacccggcgaggctttaccggactttctccgacgcaccggggccgctttgcgcgatttcacccgtcgcaccggccacgaggcgtgcggggccctggccagggatggtcagcgtttctcgtaccgcctctacaccgatggcgtgccccacgggtgcgcggtgtttccatcccaagtgttgcccggcttcacttacaccggggaaaccttccactcccaccccaccgcggccgtgatcgaactggatcgcgcgggccgggcctggagtcgtcactacggcgtgggcgtgcagcacctgcgccaggcactgcccattcgtaaccgctggcataccttcagccccgaagatttcgcaggcggacccgggtggttggtggcgggaaaccggttgctccaccagcgcggggaaaacgaggtcacccgccacggacggctctccccctag

SEQ ID NO: 537053 - DNA, 210 bp, Stenotrophomonas maltophilia
atggacagcgataaccgccgtggccggcacgcgctgctgggaatggatcacttcgcgatggtggcgttgaccctgctgctgggtggcagcgtgatcgccctggttggccagtacaccgccgcccaggcggggccggccatcgtactgagtctgctgctggccgcactgggcacggcgccgatgctgtattgcctgcacgtgctgaactag

SEQ ID NO: 537054 - DNA, 1116 bp, Stenotrophomonas maltophilia
atgggcaacttgaacgttattgatctattttccggagttggcgggctaagcctcggcgcggccagggctggatttcatgtcgcaggaagtgtcgagattgatccaattgcagccgagtatcatgcactaaattttccgcagactcagcatctcttggaggacgtgggaaatatcagtggagctgagttgctaaaaagatgcaagttaaaccaaagagagctttccgggttgatcggcgggccgccttgccaaggttttagtctgattggtaggcgcgatgagctagatcctcgcaatcagcttttcatgcattttttcaggctggtagctgaaacgcggccggccttctacgtggccgagaatgttcctggaattctcaacggagcaagtgctgactttgtgcgtcaggcgttaggccagattccttcaaattacactttgcttgcgcccattaaaattagggcaagcacatttggtgcaccaacgactagaactcgtgtgttcttcattggctttgatccgaagaaaatttctgatttgtctgtggagtcattttcccctagttcggagtggcagggaacgacagtatcagatgcgctaaaagggcttccaaatgttagtgcggattggcaggaggagagtcaaagctggcgaaagataaagccagtaacttctagtcaatttcatgagcgcgcgaggggggtgatcccacctggcgtcggtaacagagaggcggtgctgcactctgccaaaaacctcgtttctggcttccttggaacccgacattctgacgagacagtcgcgcgattctccaaacttagaccaggtgaggtggacaaggtctacaggtctcctcgcttagatccgaagggactatgtccaacgatcagagcgggaaccaactctgataagggaagctatcaggctgttaggcccattcacccaaggcatccccgagtaatttcgccgcgtgaagcggcgagactacagggctttcctgactggttcttgtttcatccgaccaagtggcactcattccgacagatcgggaatagcgtgagtccgattgtcgctgagagagttctttcggtaatcttcaatgcccttaagcgttaa

SEQ ID NO: 537055 - DNA, 1020 bp, Stenotrophomonas maltophilia
gtgcttctctcgagccgtgagggaactcagcaaatgagtggggggaacatcgcctatcatctgcggccaaataaggcggctgacagagctctcttcctggatttgctcaatcggattggaagaacatccttcaacatatccgattacaaatattatggattcggtggcccattcatggaggatttccgggcgatacatgctgccaccaggatttcggacatgacatgcattgagcgagatgccaccgttcaggccaggcaacgcttcaactgccctctcagctgcgtcagcttccaactaactgactcttcaaccttcatatctgaatttagctcagactcaccatcggtcgtatggctcgactttacttctcccggagagcttaagcagcagcttgatgacacgtttaatctcgttaacaagctcgctcacggggatatctttagagttaccctcaatgcgtcggtatctgcgcttcgagaggacagcggcaacctgaagcaggatgaattagttgctctccggcgaagagtgtttattgatcgatctgggatagattgtccaactacaattaaggactccgactttcgagcgaatcagtacccaaccattctcctgcaggcacttaaactcgccgcaattcgtgccactaaccactccccattggtggtccaaccgttatcagccttcacctattccgacggaaccacgatgctaaccgcaacaggaatcgttctggactcctcaaaattgaaaattgaagaattccccattgatagccggattgcccactggccctttgcaaatactgactggaagtatccacacgaaatcgaccttcctacgctctccagtagagagcgcctcgcacttgaatcactccaaccaaatggaacagttgatgcggctagaaatattctaaaagatgcgattggcccagacggcatcacggagaaagcagtacggtcatatggaactttctaccgcatctatccagagttcgtccggattaacgcttaa

SEQ ID NO: 537056 - DNA, 1353 bp, Stenotrophomonas maltophilia
atgctcgttagagatatcgaactaaaggacgctatattggaccttctcgacaattgcgtcgatggtgttatgcgatctccaactcaaccagaagatccggcgatcccgtacgctggctattgggccaggattgagtttaacgaaaactccttcaccatcaaagataattgcggcggaatacctttcgagatcgcagaggaaagcgcatttcgtcttggacgaaagaacgcggagctagacgcagagctacctactgtgggtctttacggcatcggaatgaaacgagccattttcaagatgggaacttcagctcgaattaaaagcgaaagatcggacaaatcattctacgtagatatcactccggaatggatgctggatgatgacacctggactttcgacatggttgaaattccgaacccagaggaattgtcgttcggaaccaccatacgcattggaaatcttcgaccagcgatatccaatagtttttcacgtgatgagtttctgaatgagttcagagaggccgtgcgggcttactacgggtacatcattgagaagggatttaaggtcttcatcaatgatgtcgaagcagattcacggaagatcaaactaattctagaagacaatcccgatgactcaggtcaaagcatcgccccatacatctacaggcgagagggccagcctgatggtgtggacgtccacctttccgtggggctttatagaaactccctaagcgacgaagaggaagagcaggaactggaaggtcgggcttcttcggagagcgctggttggacaattatctgcaatgaccgtgtggttcttcatgccgacaagtctcggcttaccggctggggagaatcaggcgttccgtcttatcacactcagtttgttgcgatcgcaggaacggttgtatttagatcaaatgatccatccaaacttccactgacgacaactaaacgcggtgtggacgccagtagtgaaatttatcttcaagtaaaagatttcatgcgggacggccttaaactctttacaaactatactaacaaatggaagaagcgccctactgaacgaaaggaacgcgagtcccagacggagtccgtgtcgcttttgcttcctgaggaaattgtgaagaacggcagcctgaagtttactaccgttcgaaagactattggcggcgagcagtttaggcccgcattaccggcacctgaatcattcactgatcagtggataagattctcaaggccgaagtcagaaattgaagcactttctgatctctacttcggcacgacagatgcgaagccatccgaggttggggaggagtgcttctctcgagccgtgagggaactcagcaaatga

SEQ ID NO: 537057 - DNA, 933 bp, Stenotrophomonas maltophilia
gtggccaaggcaattttcacttcttccgagatatctccatatcgggatctcaaggagcagtggtatcacttctcaaagaacttgcttgcccgggtgcaagagactataggtgactgggtcattttctatgagccccggcgaaatagcggcccaagcagctccggaggagctcaagcctatgttgctctcgcgcgcgttgtacgcattcgtccagaccccactgcagcgaattactatttcgccgatcttgcggagtacattgagttcgaccatcgggttcccttcaaatatgaagagcactacttcgaatctgcgcttcgaaaggccgatggatctgcgaacaaaggagcattcgggcaatccgttagagtcataccagattgcgaattccacaccatatgcaaccttggattcaagagctcgctgtctctgattgattccgatgaccggaccaataatgcggatgctcactatccgggagatgtcaaacgcgcgatcgccactacaacagtgagccgtgccgtaagggacacttcatttaggaagcgagtccgccatgcatatggaaaccgctgtgcattcaccggactcatgttgcttgatcgacttggaaatcctgaggttgaggcagcgcacattcggccggtatcaaaaaatggaccagatacagtgagtaacgggattgcattaacaggaactgtccattggatgttcgacgccggcatcgtttcaattgatgaagatcatcgaattctcgtgggtagcaactgcgcctctcttttccatttgacgagtctgttccccgatgacggaagagtatgcctgccacgacttccggacgagagacctcatcgtaggtacctggagtggcaccgtaagaaggtctttaaatcagaaaatctcgacaatgaatccccccttgaattgccataa

SEQ ID NO: 537058 - DNA, 510 bp, Stenotrophomonas maltophilia
atgcccattgaattcaggcccgactccaactctgcattcgatgcaaccagcacggtgagaatttcttatccacgggttctacctgccacgctgtccgatggacgtgacgtcactgagtatcaatacactttccgtcgtgacggtgagcgagtagcgtcgcttggcatctttggaaccgaagcgcttgcagttggcgaaaacagccgtgagcgagtttacacgttggaccttagcaccagcgaagtactgaaatcgatcatcagcttcaaagatgaaatcggaaataccgatgaggcttatgcattcatccgtgccgtcgcgcagggcctgattaatgtgttttccaatcagcccagcattttcgagaacattcgctacatcgcagtagctcgggctgattcattgcttcaacttggtatcgcggtgccggcagacagcattcggttacgggacgaggcagtagtcctaggcagcttgttcgtgccgcagaagcaggccgaggcagggtga

SEQ ID NO: 537059 - DNA, 261 bp, Stenotrophomonas maltophilia
atgaacgccgacctgctccaggaaggcaccgacgtgcccgacttccgcgaggtgggctacgtgctggccagtctgtcgggggtggacctcgccaaggccagcaaggccaccgtgcgcgcgtgggaggcccgtggcctggcgctgatcgcactttcccgtgaggaccgggccgaagccgagcggatcatggcccctgtatcgaaacgccgccgccgcggcaccaatcaggccgccgccggcgcgccgaaggaggaagcatga

SEQ ID NO: 537060 - DNA, 150 bp, Stenotrophomonas maltophilia
atggctgaccagctgctcaccgctgcaatggttcacgtgttcgccctggccgggttcctggccggcatcgccaccctgtgggcgatcagccgcgcatgccgcgccgcgcgcaatgggctgcgctggtgctggcggagggtggccgcatga

SEQ ID NO: 537061 - DNA, 513 bp, Stenotrophomonas maltophilia
atggaggtcgcctacgccgctggttgtcaagccgccctctccacccatccctccccgggtggtcagggggaggcgcgcgcactgattcagcgatacgacgcggcaggcgcaaagttccgtgaatccctgatggacgaccactacagcgatgcgcagcgcgtggaactgcgccgcgaactgactgcggttcaagacgagctgctgaccgccctcgcctcccgccagccggtgggagagccggtggcgtggatcagtcgaatccgctgcgtaggccccgagtatgggaaggagatctacgggaagctcccggttcaatccctgaatcctctctactacgaacatatcccgctctacgccgcccagcccgcgcaggagacagctaaagctgtagacctggaacgattccgtcccgcagtgatgacggctctcggcttgtcgtcgccgtacggactcgaacgggaaacgctgaatgaacttctggatctgatcgacagccaggcggtgggcaaatga

SEQ ID NO: 537062 - DNA, 615 bp, Stenotrophomonas maltophilia
atgcggctgaggatcgcgcaggtcgaagctgcgaggcttgatagtggtgtcgggtttgaaccgcttttcggggtgtgcggcttatcgggctctgttgccagtcggtgcggactaagaactgttgtaaagaaggctgtcgcgctattcgcttgtggcgtgggcgattgcgccactttgattcgctatcagcagagcagatgcgcgaatgcgtctgctggcgtcgcgtgctgcacgaatggtgcgtgcaacaatagttcttcgctcttgaattccgcgattccttcgcgaatttctattggcattcgaagcggcggcgtaaacaccatggcgcgccaccgacaaggggtggccgggtctgcaaacccgaagaaagcgatgtctgtagtttgcgcttgcccgtcggcaccgtccttaaccggtgccggcgggcaatccgtcggcctgtatggcgggcggtgcgtgggggccctcgggcccgccggtcttatgacatcgcttcttccggtttgcagccacgcatcgtccgccacccttcgcggtggcgctgttaagcacagccacggaagccgacgccatgaacgaatccgacaccttctcctcgtacaccgttgttga

SEQ ID NO: 537063 - DNA, 738 bp, Stenotrophomonas maltophilia
atgaccacaaagtggttcaccacggcagctttagtggggctggcagggagcaattccgacgggacattcgtcgcttcgacgccatcagatagccgacctatctatcacctgaccaagggctgcttggttcctacagcactactagcaggagtcatctacattctgctgtcagtctgcgtgacgcctctcccgaattctttgccagcagcagccttgctggcaagatcaagtagccatgtcagcaaagatcctaaagaagcatatgtggccaccattaagttgatagagatcacggacaatgcattcattgcccgcaatccatacttagcatcagtgcacttccaggcatccccaagaactacaatcacatcatcgatgcatgacttcagcttggggcaccccagctacaggcatacgtaccatccaagggaatcgtttgggattggcctgttcgtactgattgacctccacgcgaggaaggttccgcttgtcatagagcatgcccaaccgcaaagccaggcttgccggggcagccagaaagagagttatgtctgtaatgccgtttcgagccaaagacatcactgtatcgaggaactgctgagcgagttgttgttgtttcaactcggaccagtgcgtgtcggtaccacgcccctccagatccatccggatgacaggcgttcccgcttcagcggtctgcacatcaacatcaagaacatcgtacgaagcggacacgcatag

SEQ ID NO: 537064 - DNA, 465 bp, Stenotrophomonas maltophilia
atgcaggttgaatttacggataacgtcaaagagaagttgcgcaaggcgctcagagcggcgggcagccgagagattggcggtgtgctgatgggggagcagatcgagcccggccatttccgaatcgttgacttgtcgcttgatagccagacgggagggaaagcgcatttcgttcgaagctcggaagcccatgccgaggctttgaatgcgttcttccgtgaaacgggggaccagtatgaccgtttcaactacttgggggagtggcactcgcaccctcgatttccggtcacacccagcactcaggatgttgagtctatggtcggtcttgtcaacggtgaacgtggaatcgactttgcggttctgctgatcgttcggctgcattggtggcggaagatcgcatgctcttgcaccttgttccgccgccactttagcccatcaccggttgtcattctggaggatagacattga

SEQ ID NO: 537065 - DNA, 1719 bp, Stenotrophomonas maltophilia
ttgatctggtgggcggagcaaccacgaagagcgcagtcggagcgagctgcaatatcggaactgacagatgaacatgactggctccaagctgtggcctggaggctgaccggggagttacagattgccgtcgatttcgaattggtagtgaatgataaggtcattcctctgacactggactttccggagttctttccggatgtggtgccgtcggttgtgtcccgcgaaaaggaacgtctgtccggccatcagtacggtccatcaggtgagctgtgcttggagtaccgcactgacaactggatgccagagatcactggtgccatgatgatcgaaagtgcttatcgcctgctctcatccgaacaggaaacgggtgagcacgcaccatcagatcacagagtcctccctgcgcagcgagcaagacactccaaattccgcttcctctgttccagaggcatgtgggctggccttttttttgttgaagaggggcatgcagtcgatgctgagctgcaggagcaccatctcgccggtgtatacgcagctcagctttcacgaataggtcctgctgaggaccccatttggcaagagcccaataggcgtggctatggtgctacttcattgaaggcaaaggtagtccgcttgcctgatggggaggcggtcaaatgtcgggcattcgaagaccttgcagcactgctggaacagcttgggttgggagagttggcggctgagctgagtcaagcgccgagcgagaccgaagtaattatcttcgacgggcaaagcattcaagcgctgatgatattgggccaggctggagcgaagaaactcatcaactacgatttggtgcttgctgagcttgatggcgttcgtcttgatcccgcatacgtcaaccttcggtctgccaaagttgcgattgttggctgcgggtctgtaggttccaaggtggctgtgcagcttgccagagctggtatcggcaagtttgtgctggtggatggtgacattctggccgcaggtaatctggttcgtaatgaactcgactggcgtgccgtggggatgcacaaatcgcaggcgttggcagctcgcgtgaacgaggtaaatgccgattgtgaagtcctcactcgcacgaccgtactaggcggacaagagagcggagggtcaacagctaccacgctggaatacatcgcagaatgtgatgtgattattgatgcaactgccgaccctgcggtctttaacctgtgttcggccattgcacggagagccaaaaagtcattgtgctgggcgcaggtgtttggtggcggggttggcggcatagttgttcggttgcgtccagaagttgatcccacgcctttggaggcccgtagacgcattgaggcgtggtacgccgatcagggcgtaaattggcctgatcaacctgcctcccagccttattccgggggcgacgaatccggagcgccgctgatagccgacgatgcagatgtaactgtgattgctgcgcacctgtctcgctttgcaactgacctgattgctcgtcccgaagccacgatcttcccatactccgcctatttgattggcctgtccgaaagatggcttttttcggcgccatttgatgtgaggccgatcgatcttggcccaaccgatagttggggtactgaggcgcaagatggcgacgctgaggctttcaagcaattcgtcgcggaccttctgccaaaggccaacaatgcaggttga

SEQ ID NO: 537066 - DNA, 1200 bp, Stenotrophomonas maltophilia
atgccgacaaaaaccgccgaagactttctggccgcgcttgcggatgagcttgcaatcagcgagtcacgttacgaacaggcccgccgtagctatgcgtcactaggggactggcttcaccggccagagtcctcagtcctcgaatacgatccccaggtctatgtgcaaggatcatttcggctggggacggcaatccgtcctttgaatgatgacgaagaatatgacgttgactcggtgtgcgtgcttcggttcctcggaacgagaagcttgacccaggcacagctgaaggagcttgtggggaacgaagtaaaggcgtaccgcaaagctcagaacatggtgaagcctgttcgagagggacggcgctgctgggtgttggactatgcagatggtgcacagttccacatggatatcgtgcctgctgtaccaaatgctgagcggcagcggatcttgcttgaagctcgaagtctagacctgaaatggtcggagacggcaatggttattacggatcttgagtcccccgtctaccatgtgctttccgatgattggcaacgttccaacccgaagggctacgccgaatggttcaagggcagaatgggggaagtgttcgaacgccgtaagcgcgcattggcggagtcgatcaaggccagcgtagaagacattcctgactacaaggtaagaacacctcttcaatctgccatcatgatcttgaagcgccatcgtgacggcatgttcgagggacggtatgacgaacgcccaatctcggtcatcatcacgacactggccgctcatgcgtataacggcgaggaaaagattgctgatgccctgtatgcaattctctcgcggatgcatgagttcatcgaacatgatgggtctcactgcattattcgaaacccctccgatcctcttgaaaactttgcggacaagtggcctattcatccggagcgggaggccgcgttcttcgagtggttgaggcaagcacgtcaagatttcgggaagctggcagagcaggttgagcgccgtcgcctgatcgagagtgtccaaccccgtatgggggctgccgtcgagagggcagccacgcgactcggccctctgcctgggagcatgctgagccctgcatcagccgccgccgcaatcgcagcagccagtgccccagcatttccgaacactcggcgggaacctacttctcccagggggtttgcttga

SEQ ID NO: 537067 - DNA, 657 bp, Stenotrophomonas maltophilia
atggatgtagccatcccgacacgcaaggtacgccatctcgtaccgatgggcctctttctgacactgacggcctgctcgccttacgcagacgcagagcgtgacgttgccgcaggtggacgcggcctggccaagctcaacccgtcaccgcagcagggctacgagctggtactgacactgaaggatgcccccggtcccttcgcggtggtcgagggcgttgcccagtacgacgcccgcaactacgcagcatgcgggcagatcgtgcctgcaacgggcactgcgggccgcatcaccagccaggaacctgtcgtgctgcgccacgtgggtgagaacgagtaccgcggtacgttctacctcgaccgcatgcaggacgaggactactacgggcgtggcgtctgccattggacgctgacgggtgtcggtgcgatgttgcgcgcgacgggcggcgaggcggatacgcgattcctgacgttcatcgacaaggagcgcatggacgcggggagcccgttgacgcggtactacccacgcgccgactacccccgaatcgaagagatcaccggatacggtgcgagcggcgaggaagatccttccagctatcgcgccgatctgcgcaatgcgctgttctcaaccaccaccactgtgcagaaactcgcgccatga

SEQ ID NO: 537068 - DNA, 906 bp, Stenotrophomonas maltophilia
atgcaccatccgtcagcgcccggcaattgttcgtgcggacccggcgcggtgggtcacggctcggcgcacgctaccatcaacgcatgggctcccggcagcccacccaccgcggggcccgaagcgcgagcctcacccctcccaacgcgactgcgcggaactgacaccgcaaacgaacccggcggcagcagcaaccaacaccccggccagaccgcatttcatcatcccaacctcctgattcagtggcacagcggagaggccgcagcatcaatacgctttgaagatcggctttgtgcaatccgagtagaaaacctcgcatgcccctgcttgatcattcgtgcagcctttctgagcttcgcgctctgccacgtcgagtgtcggccctcgtccaatgccagagccaccctgacctgtccggccgctgggaactacccatgccgcacactgattgaagtaggcaagcacaacctcgcaatcgttcgcacccgcggaagaacatttgccaagggcttcctgctccgctccactcttccttcgctgccctgtcgacacacctgcatccgaagttcgcttggatgtggcaattgcaccccaggtggtgatccattctccagacggttgtggcgacgaaacgggagcggtcatccccccattgtttgctcccgggataggcgcacagccctgtactccctgtcctccgatcggatacataccagaggggcagttgccctccgcgcttgcggacgagaatgcgagccagagcattgctgctacgaccacttgcatcaaacgactagtcattgtcactcactcgcgtccgatacaatttccaaccatctgcgaacatgcatgaagtctccggggcacgctggaaaaagcccaagccatatcagacgctgtcacgcatag

SEQ ID NO: 537069 - DNA, 666 bp, Stenotrophomonas maltophilia
atgccgccctgctgccaatggccccgatgcgccggacttctttcgcgcacgcagcttactgcgtggagatttcggtcgtcgaagggggctagagcgaaaaacggacttgatcatgcaaaaagcacggttatcgtgaatgagtgcttagtctttcgcgtgagcatccgctacggacaccttgtacagcgtggctatcctggttcgcatgccgaacactcagctgaagcatcgatggatcagcaccttctaaacattgaacagaggctcagtgcaatctgcgtacgatgctatacgtgctcacgacggttggttccagcacctcccttgaggcgcccccgtagcctccgcctgcgccagaccgtatccatgccggacagggactatgtacttcccccgctcagggtgatccagaaagcgcaccaattgaaggaagtcatgccgcccctgatcacgcgcccaaaaggcggcgcacgcttacacagcttcccgttctgcgccgttgacctatctgatgtcttatcagtacttccggaagacgggcaaggagcattcggaatagacgacggcgcactttccgcctccggtatcccgacgatgaccaattgcatttccagcgacggtctctgcatctaccgccgtatccaaggagccctgcccctttcctga

SEQ ID NO: 537070 - DNA, 309 bp, Stenotrophomonas maltophilia
atgagccgccagatcatgccgttcggcctgcgtatgcccgatcaccttcgcgcggcgctggagtcttcggccaaagaggcggggcgctcgctgaacaccgagattgtgcgccgccttctccagacgtttgaggaaaccgacatgcctgctggtgaagaagaagggttagctcagttcaagatccgcctcccgagcgaccttctcaaagccatcaaggtcattgcgaagagcaacaagcgttcggtcggcgcacagatcgaactgatcctcaacgagttcgttgccacctatcaggaggattccgaatga

SEQ ID NO: 537071 - DNA, 360 bp, Stenotrophomonas maltophilia
atggaccacaccgcccacaactcagctgcccaggacctccatccagaagcagccgtccgccgccagcgccggaacatcccggtcgtcatcggcaacctgaagaactcgggcctgcacatgcccggcgtggataccgcataccgtgcggctctgttcgctggtgccaccgatgagatggcctgggaagcggcccgccgccacgaactggccatgatcggcttccccgatgagatctccgacgccgggcttgacctgagcaaggctcaggcgatgcgcaagcgccgccaggcgctgatcgatacctgccgcgccctgcccaacccgttcgccccgggcgccgacgtgcaggtggccgcatga

SEQ ID NO: 537072 - DNA, 669 bp, Stenotrophomonas maltophilia
atgagagcgctcgggtttatagcggtcgcgttcgggatcatcatgctgctcttctcttgcagcatggatacgagtgttgcgacgcagtatggcggtcgtgtcaacaacattgggctgatgcacgagcagactatcctaatattcatcagcctcggatcgatcctcatcggcatggtgatgtggattgccggtcgtaacagggtgaacggagcgggcgcacagccctctggcgctcgcctctatggagcagaggatgtaaaggacattgaagtgctgctttctggcaaggctaggactggaatcgttctgagatccgatgatccaaagaccgtgcacttcgtggtgaagaggtcgccagcagctctagccggcgttaaggcctgggaccgaattgttgaaattgatggacagtacccgtctgacgatctacggcagaactcacttcatctagctggtgacgatggctctgaggttgccatcaaactgcgtcgtgggagcgaggccgtcgatctgttgatcaagcgcgctatcgtcttcgacgcagtgcccggtccattgacttcccagtcatcgccggggagcaggcaatcgccgactggtggagtctggctttacatcgtgatcttggcactagggctcgtggcgcttggttaccggcttctggtctag

SEQ ID NO: 537073 - DNA, 621 bp, Stenotrophomonas maltophilia
atggctctggatcgccgctctgaccaggccgtggcgctattcctcgccatgactactttcttcggcggagtcgctgttggcagcatcgcgcaggaccatgtgagaaagccgatctgcggcgacaagaattccgaacagaaccattggcgcgaccgcatagccgagccagtagacggcgcccgaatcgagactcgtccgcacggcatccacggcagccccgcctcctacggagagggcggcctgattctctttgatcgagccaagaacgatggcccttgcggtgaccagacccatcaaggcgaatgtgctagcgaatgttgctccaaggcagaggggcttgaagaaatcggccactcggatgcaaacccgaggcttgttcatcgccaagggcagcagaagcccggcaatgccgaggctcgccgttccgagcatcgggatccagttcatatgtccgtctccggtaggttgggtgggtcgcaccctcaatgctaccggcagacgggcacccccgccgatcaggcggactttcgcgcgtgcacccgttttatgtccctctccagcattcccgtgcgtgtggtgaccgcgggcctggtgctggagaggggcgcctttcttccctga

SEQ ID NO: 537074 - DNA, 474 bp, Stenotrophomonas maltophilia
atgaacgtacttgatgctgcctatgacaccgtccacgactacccgggcggtgctggtcccctcgctgagcgactgacccgcctcaacaaggacggtgagcgtgtgcccatgtccgaggccgtgctgaacagcaaggtcaacccgaacacgacttcccaccacctgaccctggctgaagctgatcggctgatggggctcaccggcgactaccggatcctccatgccttggcggccacccatggcttcatggcgcagcccgtcaaggcaccggaggcaggctcgatcatcagcgccatgctggctgccgctgcagccaagggcgatctggcagagaccatcgcccaggccatggccgacaaccgcatcaccggcaacgagtcggaccgggtttctcgcgacgtgatgcgggtgatcgctgcgttggtgcaggtcagccagcacgctgaggcagcggcggagcggggtggggtatga

SEQ ID NO: 537075 - DNA, 210 bp, Stenotrophomonas maltophilia
atggatctcagaaacattgcgcaggtcgcccacactgatcggcaagaagacgtgaacaagatgcttgaggacggctgggtgctgctggccacctcaggcggcaaagatgaagagggatacccaattttctggcacgcactagggcggccagaggacccaatcctctttgcgatcgagctgctgaagagcagggttaaagccaagggctga

SEQ ID NO: 537076 - DNA, 843 bp, Stenotrophomonas maltophilia
atgcgtgagtacggacagatccagtgcgcgctctggcagagccaagacgcccagcaatggaccgacgccggcaagctgctggccgcctacctgctgaccgggccgcactcgaatggcctgggctgctaccgctgccccgacggctacgtgatggccgacctcggctggtcaatggaaagggtttcggaagggtttgccgaactgtctagaaacggtttcgcataccgtttcgaaggggttgtttttctgcccggattcctgcgctggaacaaggtcgcgaacgccaacgtggccgcagcgcgcatggcggagttcgaggcgcttccgaagggggaggcaaaggtccgtgtggccggcgcaatcctgaagtacgtcaagcacttgggtaacgactaccgaaccgttctccaaaccgttgcagaaacggttcccccaacggttaccccaacagaacccaacccaacccaacccagagagaacccaaaccaaaccactggcgctgcgccggacacgccggctccggctgacgacctgctgccgctagagccagttgaaccaccggcaccggaagtgatcgggttcctgctgaacgacggttccgagttcggactgacgcaggtgcagttggacgagttccaagggctgtaccccggcatcgttgtcctgcaggaactgcgggcgctgaaggcctgggcaatggccaaccccaagaaccgcaagacccgcagcggtgccatgcggttcgtgaactcatggctcagccgtgcgcagaaccaggcgcccactcggcggagcacagcgccggcaccgcagaagggcgaactgccgaggctgagcgcatga

SEQ ID NO: 537077 - DNA, 669 bp, Stenotrophomonas maltophilia
atgaacgaaaccgagaagcgggcgcgggagctgttcgaggcagcccgaggcctctacaacgcaaccatcggcgatcctgctgtgaccatccgctgcgagtcagcggcgtcgcgggatgccgtcgccgcggccggtgcgcggcttcggctcgcactgctcgatcagcgacccacactcatccctgccgacgacctgcaggtcgttacgtcttccgcacctggggcacatgaagtgcagcccgaagctgtcgatgttgggctcgacctggccgaacccggtaaagacgctgtggcagggaatgcactggagcatggatccgatgtacgcccggaaggtgacggtcaggctacagccgaccattttgcggatgacctcaaaatggtcgagcgggcgcgtggccttctttctgctgaatacctcgagcagggatggtcgaaacacgatgcagcactgcagtcggcccgggatagggtcgctctaggggccatcatcgccgccctcacgccgcccgaggggttcgtgcctgagcgcagcgtgctgatagcttcgacgcgcctgcggaagttggccagtgctgccacgccgatggcgcgctcggcctacatcaaggctgccgagattgttgaaatggcggtaatcgcagctcgcccggaggtgccccttggctga

SEQ ID NO: 537078 - DNA, 183 bp, Stenotrophomonas maltophilia
ttggctgacgtgcatatcgacatcagcggcgaggacggggagctgtccgtcgtgaatcctattgccttcgacatgcagatcgccggttgcggcctgtgcatcgacatgacccacgaacaggctgggggcctgtacgcgcagctgggccagttctttggcgatgagagggaggtgcagtcgtga

SEQ ID NO: 537079 - DNA, 600 bp, Stenotrophomonas maltophilia
atgcgcaacactgatccgctgaccgaagaactgcgccgatggggacatgcccaggtgaatcggtttgccctgagccgcgccgaccgcagcgcgcacgtgctggagcgggcgcgggacatggcaccgaagacccccgagcgtgcgatgcgagatctagttgcgcgagacggtgccgaccgccgacgcctgatggccgccgggagcggcgtcaaaggcctgcgcatcgttcctctgtgggcagcggatccgatccgggcagccaacgacgcagaccgcccccacgacaatcccgagatcgcggtggatgtcggtgtccccgatgagctgcgctgggtggatcgtgcgctctcctcgcttcagcggcagagcctcctgaggtcgatcatcgtcagggtggagttcaccaactcagtgagccaggcgatcaaggctcggatggcatgcgagctgttcgagaaggagatggcgcagcgtcttgggattgagccagttgtgcgacaacagggcgaccctgtcgttctgactgcgcgccagtaccgatacgagctgtcgagggcgatggatctgcttcgagggatgaggtgggctgaagccgcttga

SEQ ID NO: 537080 - DNA, 477 bp, Stenotrophomonas maltophilia
atgaaccgcatcgccatctacctgctggctttcgtcgcctggtccgctggcatgttcggtgccggctgggcctggcgcggtgaccgggccgaaatcggggaagctcggcagcatgccagcaccagcgccgggcaagtccagcagctcaccgagacccgtgccgtcgagcacagccaggccgaggcgctggccaccatcggagccaagcatgaagaagaacgcattgcggccgcgaccgtccctgctgctgttgtggctgacctgcgcgctgggcgtctccagctgcgcgacgacctcgccacctgcagcacgagcctcctgtcccaagccgtcgccggcgccgtcgaacgtgatgcgcacgccgaactacgagcagaggttgcgggagctgctgttcaaatcggccgcgacgccgacaaccacgtccgcgccggccaagccgtgatcgaagcagatcgtgaaggagttaacccatga

SEQ ID NO: 537081 - DNA, 171 bp, Stenotrophomonas maltophilia
atgacccgttacgcgtggacttcttgggcaattgccctggtgctgatcgtattcggcctctgggtagttgattacagtttccccggcgctcttatctgtatcggtatggcgttgctggcgatggtgtgggtggtgatggattttccgccccggagagcgccagggggctga

SEQ ID NO: 537082 - DNA, 354 bp, Stenotrophomonas maltophilia
atggatcccatcgagagcgaaattcaggccaagggcctgaccgcgccgcgcgtgacgccggatgccatcgaggctgagatcgtgagcgaggccttcttcactgccaaggagggcgtatggggcgcacatcccggcttcgagccgatgccggaaacggcaccggcactggcactgctcacgttctgcgttttggtcctccgcaacggcttcaccgtcaccggtgaatcggcctgcgccagcccggagaacttcgacgccgagatcggccgcaagatcgcccggcagaacgcagtgcaaaagatctggccgctgctgggcttccgtctgcgcgaccagctggcgagcgaggactga

SEQ ID NO: 537083 - DNA, 159 bp, Stenotrophomonas maltophilia
atggccatcacccgcaccaaggaaggctatctgcgcgcaacctttggccccgtggtgcttgagcggctggggtgcatcgcagttgcctgcttccgcttcatgcacgtaatcaaggtgggccgcaggttcgcagtccgcctcgggaggcacacggcatga

SEQ ID NO: 537084 - DNA, 201 bp, Stenotrophomonas maltophilia
atgagaatcttgaagcacggcaccgcgccgggcgacaacaagcaccgggccacgtgcaggaactgcggaaccaaggtcgagttcatgcagtcggaggcagcctatgttgccgaccagcgcgatggcgactatctgcgcatcaagtgcccggtgtgtccgcgcgacatcaccaaggcaatcgagatccggcactggggctga

SEQ ID NO: 537085 - DNA, 357 bp, Stenotrophomonas maltophilia
atgagtgccttctatgaccgcatgcaggccacggccgagcggctgattgctcgcttcggctatgccacgcaactggagcgcgacggtgccccgaccggtccgccgcataacccgcagcccggcccggcaacgcagcacgattgcacggtggtggagctggactacagcctcacggatcgtgacgcaacgctggtgctgaagggcgacaagctgggcctgatctccacctctgtggacatccagccgggcaaggacgaccgcctgctcctgggcggtcagctgtatcacctcatcgacctgcagccgctgtcccctggcgggcaggtgctgctctacgagttccacgcgcgacgctga

SEQ ID NO: 537086 - DNA, 468 bp, Stenotrophomonas maltophilia
atggccgaagcaaagaccaacgcaggcagcaagctgagcatctgcgtcaccccccagaacgcagacctcaccgaaaccgagttcaaggccctcacctacgtccaggtgaagaaggtcggcagcatcggcgagcgcggcatcagcaccaacatcgtcaactacgacaccctggacaccctggtctcgatgaagggcaagggcatcaccaatgcaggtgacccgcaggtcgagatggccgaagatctggctgatccgggccaggtcgccatgcgcgctgccggtgcaccggacgtcccggacgcctacgccttcaagatcgagcacaccgacggcagcattgagttcctgcgtggcctggtggccggcccgaacaagccgggtggccgcaatgaggacttccgcctcaacacctacaccatcgcgctgaaccagcagccgattgacgtggcagcgccggtcacgccctga

SEQ ID NO: 537087 - DNA, 300 bp, Stenotrophomonas maltophilia
atgaagaggattctggcaggggcgttggcgctggccatcgcaggctgcgcaacggtgggcaaggaaatcaccgatgagtcgatatcggccatcaccgacggccagaccacagaggcgcagctggtggcgcaactcgggcgtccgtactccacggttaccaactccaatggcacccggacgatggtgtggacctacgcaaaggccaacgcattcggccgcgcgcagggcaagtccgtcagcgtggtgctgagggacggggtggtggaaagccactctgtcgccgaggtcgccacgccctga

SEQ ID NO: 537088 - DNA, 393 bp, Stenotrophomonas maltophilia
atgaccgacctgagcaccatcgtcgccgccgcgcgcacgatcgacatcaagcatccggctaccgatgcccccgtgggcctggtgctgaccatcctccccgacagcagcccgcaggtgcgcgccgcgtcccgcaagctgaccaacgagcgcatgctcggccggggcaagctgaccgctgagaagatggaagccggccgcatcgacatgctggtggcctcggtgggcggctgggagtggcagggcgacctcaacttccatggagagaagcctgccttcgaggagaagacattgcgcagtttgttcaaggagctgccctgggtggccgaacaggtagacgcggcactgggcgagcgcgccgagttctttcgcggaactgaccaggaagctggctga

SEQ ID NO: 537089 - DNA, 315 bp, Stenotrophomonas maltophilia
gtgccggacagcaacggggaaacccgccggacccgcaacgagcgtttcggagagccatccccagaggtgagggtcccggagaggggcgaacatatctgggagtggttctggcagctctcggcgcgtcgtaggagcggtccggaggcattgacctttgctgacgttggggagtggtgccggctgcttctggtcgacccgctcccgcaggaggtggagatgcttatggccatggacgacgcctacctcatcgcggttcgggaagaccaagcggcagcccagcagcgcgccatcgaggaagcgaggagcaggaaatga

SEQ ID NO: 537090 - DNA, 750 bp, Stenotrophomonas maltophilia
atggtgttcttgctcttggccagcacctgctcgatcgccatggcctggcgctcgctctcggtcacctttacgccggtctccaccagctgcttgttggcctcgatctggcgttgggccgctgcaagcatgttctgcgctgcggagtcgtcgccgttgcgcttccccacgccatcgcggcggttgaatgacttgtcaacgtcggcctgtgccttggcgatcagcctctgcatggacccgtcgaagtgccgggcatcgttgtcggccagcttgttgtactgggcgatgatcttcagtcgagccgcttccttggcactggcacggtcgaggcctgccacttgggcattgatggcctcggcggcggcctgctcggcagtggcccgctcctgcgtcaccgcagcgaggtcacgcgccgtctgtggatccagcgctcccccttcatcgatgggcttgggcagcggcggcaagcctcgcatgccggcagccaagccgttcagcgcatcggtgatggatggcagaccgagattcttgaccagagtgccaccggccaagccgaggcccagcacgtcgctcaggcggggcagtcgagccaagacgccccattctccagcgagcgccactactgcattggtgaagttcccaagcgcgccccatgcgccgccgatatcgtccttgatgtcccgccagcccttggacatcgccggcatcaccgcctcggtgcggctggccacgtcgtccaggtgggtggcatag

SEQ ID NO: 537091 - DNA, 1410 bp, Stenotrophomonas maltophilia
atggggacgtaccacacgagcttgtcgagcggaaactacgggatctcggattgcgctgcggagctgatggcatcgcttaagcgagttgattcaaacggtcggcgtgcgcctatagaaaaaaagcatattgcgttcatatgtcacagtctgggcggaattgttgtgcgccatatggttgactactattccgatgaatttgagagccacaagatcggcctggcgttgattgcgtcgccatctctaggctcggattatgcaaaatccctgagcgccttcgctggattcttcagaaacagagtggggcaggatcttcggcctggtagtcaggctttggaggagttagatagaagattcatgcgcttcctggaaaggcggcctgcagggtccttctttggtgttgaggctattgaacatcactccatttttcttctcaaatttctccctgattttaagccaatagtgtcttcggcttctgctggtagatactttcagaattcaaagcggattccgggcactaatcattcgacaattgtcaagccgagtgggctggatcatccgagtcatgatttcattgtcgactttttctcggcggagatatttaaagggactggtcaggtcgctgtatctaaaaatcagtacttgatagatccaactgaggcgctctttgatttttacgatccaagtgttgagaaattttacttggagcgtgcagcggatcaggagcttaatgcttgctcaaagcttgggagtgtttgggtggccggtccctctggggcaggtaagacttgcgctcttcggcggcttagcgccagccagtatgaaaagaccgtcgaagtgtgtcttgcgcagtgcttttcggacgattcgaggacggagattgtggcagagatgctcgatactctacgccagtttggatacgtgcaggcagtggcagagtcggattccccttatcaggtcctagttaatagtctggtttccgttgccaatggtccggttaccgtagtcgtttcaattgatgaggttccaattggcaatggccggtccactatcaattcacttctttctcttgcctttgaccttcttgttgctgtctcgcaaagagggaggagaggattaagatttttcatctcctctatttatcatcctgatttcgatcttctggacgggcgagataaatttatggagaaagttcagttggttgaattcgttccgtggagtgacgctgaactgctggcactctttgaaattgcttgtgaggcacttccgggtctaaaagggtgtgatcggaatgcgctggtggccagatctgcagggaatcccagagagctaaaaaaaatgctccgtgagtacgtacgatttggtggggttgctccagtcgatggggttgtttgcattgggagtgtgtcgtga

SEQ ID NO: 537092 - DNA, 2592 bp, Stenotrophomonas maltophilia
gtgattgaggctaagttgaggccaaggactataatcccagcgcacctctatgttgagaggccggccgactctcagataattcagataattgaagaaatggggcggcctggatatgttttggttgcgcgtcagatggggaagacaaatcttctcttgaatgcgaagcgaaaatatgagggggcagattgcagcttctgctattttgatgcatcaaattcacagcctgaccttaggtctttctttagagcgctgattgacgtttgtatcgatggctatcctgataggttttccgtagcggctcagaaaatccttgacgcgcggagggcgacttcacttcttcttccgcacaaggagcatgaagtcgaattgagatatctccttgggggtttttccgggaagattgtgatctgtatcgatgaaattgatgcgattaccaggaccgcttattcggatagagtattttcgcatattcgcagtacctatttctcggggagaacaaatttccctgagtttgaaaggttgacgtacgtcctttctggggttgctgagccatctgaaataatacgagataggtccatttctccatttaatattggtgagaaaatatacctggaggattttacttgtgagcagactcaagagttaattgataagtctggcgttaaattttctgcaagtgttgtaaatgaaatatatgagtgggcttccggtaatcctcggatgacctgggatatatcttccgaggttgaaaggcatcttttggctggtgacgtcgtcgatgtgagggcgatcgtcgaaaaactgtatcttgatcgatttgataggcctcccgtcgatcacatgagaataatagctcagacggatcgtgacgtccgcgaggggttgatgtcaattcactacggaaagggggcgtctgtctctgatttggttaggagtaagctctatctctctggtatatgtgggtcgcttcgaaatagctccctgcgtattaagaataagattattgagttggccctttcggaggcatggcttcttgaggttgaaaagggatctaactccctgagggattatgcaatagatttgttcaggcaaaggaagtttagagaggcggctcaggcatttgtcgaattcgagggcggcagcgttgagcctgatgagcagcttctcttggatttttatttggggtcatgcctctattttttggatgactatgacgcagctgcgctgaggttggagaaagcgtcagcaatcagtcgtgttaatcagcgtgatctttatctgacaggtcgatctaggcttggtagcagcctgctgcgtgcggggcgagcggacgaggcgatggtcgtactcgaggagttgttaggtgagaccagttcggagtgccctgaaaagcgttctcaatggtacttccaggcatcaattaatcttagtagcgcgttaatgaatatgaagccgccccagcttagtcgagcttctcagatttgcgagtcggttatctcgcagttgtcaggatcgaagttgggtgatatggagtcaggttttttgcagatggcatatgcaactcgatcattagctcttgattttcttgggcagaaatcggaagctcaaaagagtcttcagttggcgatggggtgtgcctccgccagggtgatgccatcgcttgtcttggagcactcccttcgctttgagtcgggggaagaaaaagttcgctcaattctaaaagccttcaaaatggcggatgaagcgaaatgtccgatttcagaaaactcctttgataaggagcgcttgagctcggaggactgctctgccgcagtgtttgatgttttctcatatcaccatggctccgactcggcaattgatggatttctcgagtatgcgtctaatgaatcaattgggcatgaggtcagccccgctgaagttctggggatggcagcctttaggtcgctttcttctactgtaagtgagtatgcaggacctctatttcggagtgcagccctccttgaaaatgtcaagcgaggcgacgggcatcggctcctggttgctttggccatcatcatgggaggggtggcgaattcatcgctggttgcgttgcgcgatttgtttgccccctatctgagagaagggcgcggaaagtttgatggacgtgtaatcttcgttctagtggattccatgcttcgcggtgagaaccgagaagatgctcgaaagttggtcgcggaggctgctgagggcgcaggccttgacttggaaggcgaggtcccatcggaagatcttgatgcgctgctgatctttgcgcttgacgctgtatgtcgaaaccctggagaacttgtacttcagcacgttcagatcatcaagcgaatgaatgaggctatcggtgtgggagcttttgggcaatcgatgctatttccgccgaacttccgtgacgagtttggtcaattgctcgtgaggtctgcgccattcctcgctccgagctccggaaggttcggacgtaatgaagtagttactgtaaagcgtagcgacggaacgcagattagaagcaagtacaaatacattgaaggggaagtgaaacgagggctttcttacgtagttagatag

SEQ ID NO: 537093 - DNA, 270 bp, Stenotrophomonas maltophilia
atggcctgttttattgtcagcttcgaggttaaggacccgcaaacggtcctggatctgcgcgaaaagttgaaaagctacaagacctactgcccaattactgcgacatgctgggcgatcgtcgcagaccaaaaggctgcggagattcgggacgagctgggcgagattctcaaacctggcgataggatcttcgtccttcggtctggtactgaaggtgcttggaagaatacttatgggaaggccaattctgaatggctgaaaaaacacctatga

SEQ ID NO: 537094 - DNA, 306 bp, Stenotrophomonas maltophilia
atgcgggtggtcgacttccggacgacgccaggcgcgtcgccaagcgcacaggtccgcgtggcgggcagcggccagtacgcctatgtcgtcacgcgcccggcgtacaggtggagcggtgtgcaggtaacgccttcgtccaactggcagtgggcgtgttcggcaggatttgtgtactcgcggaacgatgggtacgacctgcagagctggaacagcggcgagggatcctacgcgccttggggtcacccggcaccggtggctgccggcactgggatggacgtgatggtcgtggacgtgagcggtctgtga

SEQ ID NO: 537095 - DNA, 375 bp, Stenotrophomonas maltophilia
atgcgcatactactggccaccctcattgcagcagtgccggcctttggtgccgcttgctctgctgctgcgcgtactagcgatacagctggtcccgaagcggtgccacagcactacagcattgaggaatgccattcgtatgctgaagcagctgctgcacttgtcgaggaacgaaatcgcggtggtgataagggcagcatgcaagatttattggtcggcccggaggaatcccgcagggacatgctatccctaatcgactatgtgtggtccgcacgaggagttctggcttggtcagcgccccatcaggccaagacagcgttggaacagcaatgtaagggccgcaagactagtatggagattggggcgaggatcgactga

SEQ ID NO: 537096 - DNA, 681 bp, Stenotrophomonas maltophilia
atgaaatcgagtgctttcgcgatttgttttgttgtttcgtcgatgatcgtaggcagtgcgtgcgcttcgtcatcgagctcgaccagccagttcacgcgatcggcgacaaggattgtaaatcccagtcagatcaccgaggtcaatgaaggggtgcgcttgtccctacttggtgatgggaagggaaattacctgtaccagccatgggctcaaccattggaagctgtgagggtacatcaggaggtttgccggaaatatgggcgttcggccgcgatggatgtctccgtcacgctgtcgccagacaccgatttcgttttcccgtgcgaatcgcccacgtccaagaagataactccatccttcgaccagagctgctacgcaaatgcgacgatgtctggacccagtgcagtcattcagggcgtgcaagacatcttcgaaggggaagcactgcttgagaaggacaaccgcccagggagcaccacagggtcactagcggtatctgtgggggggatgtgtgcgactactattcatggcgagttgattgggcctgcaggcgcgagcagaaatctatttctgccgattggctgcaccatgccatccattggtcttttcaattcggcagccatcgcttccgtgtgtgaagtttcagacgtttctaaccactcattcacagtgattcccaactga

SEQ ID NO: 537097 - DNA, 345 bp, Stenotrophomonas maltophilia
atgccactccccgccgacttccgctggacgaccaggtccgccagccgcccggatgaccccctgaccgtgatcgcctgccatggcgtatgggtggtggccatggcccagcgggtgaacgatggcatctggattgcctcgctggatcggcaccggcatggccccggcggtccgttccgctggtgcagcagctacgaacagggccgggcgggggccgagctatgggtgaccaggcacgaggcgaggttgcgggaggatgtggacgcgatcttgacttggcaggaaaaggtccgcggcaaccgactggccaaggctgaccttgatccgccgttcggctggatggggtaa

SEQ ID NO: 537098 - DNA, 465 bp, Stenotrophomonas maltophilia
atgcacattttcgtgggcgattccgcgttccaggcgcaggcgacggaggaacagcttctacagatggcctttgtcgcaaccaccgccggaccccagatctggatcaggcgtcagactgctgctggacagaacttctcgctgattaccttcgggccaactgaagttccgcatggggaggtggcgcagattgctgcgtggcgcaccgccgacggcttcttcgggcgtatccgcagtgcgaccaagagtattcccaaaggtgtggcaaggggggcgaacaacacggcggtcctgtcggacaatcagatcatgtacggcagagcctcaatctcctcgagtacctctaaggcgaccagccacgtgatctaccggggtatgtttgaagacttggacgtcagccagcgggatccagccgctacgcttgatgccgactatggtcggaagatggccggatcatcgttcaggtga

SEQ ID NO: 537099 - DNA, 798 bp, Stenotrophomonas maltophilia
atgaccagaaacacccagcagctgtcgctgcatctcatccatcgccagatggagaacaccctcattgagcagcgcaagctcgatgggtacatcaatgccactgccatgtgtcaggcagtaggcaagctcttcgcggactaccggcgcctgggttcaaccgaggccttcctgaccgagctttccgacgatatgggaattcccatatcggttcttgttcagtcagttaggggcgggcagggtgcccaaggaacttgggttcatcccgatgccgcagtgcatctggcccagtggttgtccccgaaatttgccgtagccgtatcacggtgggtgcgggagtggttgtctggccgccagcctggtggagctcctgcggcagggcttccgcatcatatccagcgctacttggccaacaaggatcaggttccctatacgcacttctcaatcctgagcgaattggcgatttccttgatcgcccctcttgaggcgcgtggctacactctgcccgaacgaatggtgccagacatctcggaaggcaaaatgttcgctaagtggctgcgggaccagggcgtagacacgtccaagatgccaacttacaagcatcgctatgcggacgggcgtgtgtgcgacgcaaagatgtacccggtggggtatctccacgccttccggcttcacttcaatgaggtgtggatgcccaacaaggcacaccagtacttccgcgagcgtgacccggctgcacttccttacttggacaagatcctgttggaagccccgggcgtgccgcagttgcctgcagcttga

SEQ ID NO: 537100 - DNA, 255 bp, Stenotrophomonas maltophilia
atgtcgttgagcgatgagtgggaagatgagcacctgaccccgtcaggctgggtgagcggaagctacaagcatgacttcggtcgcgaggagcggcccgtacctgttggagctgtcctcactgtgcgaaagcacacggtagtaggagcgattggcgcgatgcccaacgttggcgtgagtgaaaccttgctcacgggtgaccatgagctggtcagcgctctgcggaagaagtttggcgaaccaaccttcggttgctga

SEQ ID NO: 537101 - DNA, 801 bp, Stenotrophomonas maltophilia
atgatcgcgcactggatgcgcgtcggcttcgtgcatggcgtgatgaataccgacaacctgtccgttcttggtcttacgctcgactacggtccctatggctgggtcgaggatttcgatccggactggacgccgaacaccaccgatgcccaaggccggcgctatcgtttcggcacccagccgcaggtggcgtactggaacctgagccgattggcacaggcattgtcaccgttgtttgccgatgtcgaaccgttgcaggctggattggctgcataccagtccaccttcgtggcctgcacgcgccgcgatgccgcagccaaactcggcctggctgcggccgacgatgacgacctgcagctctacctgcgctggcagcagttgatgcaggacgggggaatggacatgaccctggcctggcgtgcgctgatgcgtatcgatcccgcggcaccggatgtggcgctgctggatgcggtgtactacgacgaggcgcgccagcaggcggtgcaggcgccgttgcagcagtggctgcaggactatgcggtgcggttgcaggccgatccgctgtcggccagcgaacgcctggcgaagatgacagcggccaacccgctgtacgtgctgcgcaactggctggcccaggaagccatcgatcgcgcggagcagggcgacctcggcggtgttcatgcgttgcaggacgtactgcgcaatccatacaccgagcgtgccggtctggaacacttcgccagcaagcgcccggcgtgggccgacaatcgcgccggctgctcgatgctgtcctgcagttcctga

SEQ ID NO: 537102 - DNA, 2076 bp, Stenotrophomonas maltophilia
atggctgacggctcccgctctttcaacttccctgccccgcagcgctcccggctgcgtcccggcgaaatcgtggtggatttgttcgccggcggcggcggcgccagcgaaggcctcaaacaggccctcggcatcgatcccgccctggcctacaaccacgacgagctggccatcggcatgcacgccgccaaccacccgctgacccagcaccaccgcgaggatatctggcacgccgacccgcgcgtggacgtggccggccgcccaatcggctggttccatgcctcgccggactgcacgcatttcagccaggcaaagggcggccagccgcgcagccgtaagacccgtgcattgtcgtgggtggtgttgaagtgggttggccaactactgcgtgctgatcgcctgcacggcaccaacactgcgccgcgcatcatctccatggagaacgtctggcagatcctcacctggggaccactggtggctaagcgctgcaaggccactggccgggttgtcacactggacttggtgcacgccctgcacgaagaaacggggcgaccgctgttccgcagaggcaagccggtgatggtcaaccgggttgcggataagggtgagcgagtgcccgtggagcgccaggcgctggttccggacaagcgctacagcggacgcacctggcagcagttcgtagccgcgctgcgagcgctcggctacgtggtcgagtggcggaagctggtggccagcgactacggtgccggaaccagccgcgaacgcctgttcctgctcgcacgccgcgacggcgaggccattgtgtggccgcaggccagccacggcgccgcgccgggccagaccccgcgcgtcaccgccgccgactgcctggacttctccatcccctgcccgtccatcttcacccgcggcaaggcgctggccgacgccaccatgcgccgagtcgccaagggggtcatgcgccacgtcatcgaatcggcggatccgttcatcgtgccggtgacgcaccaaggcgcggaccggatcaacagcatccatgagcccatgaagaccatcaccgcggccaaccgtggtgagctgatgctggcagtgcctgagctggcgcccttcatcgccgagcatgccaacgccagcaaccagcgcacgatggccgccgacgagccgctgcgcaccgtctgcgctggggtgaagggtggccacttctccgtggtgacgccgatccttgccggcgtcggcggccgggccggccagtccgagccgcgctcaggcggtgaacctctctacacgatgaccacgaaggcagacaccgccctggtggccccgcacctggtcaagttccgaggcgacagcatcggaacccctgccaccgagcctttgcccacgatcacctctggtgctggcgccgcgcgtccggccggcgccgcgcacgccctcggtgtggcttccacctgtctggtacagatggggcatggtgaagggaagacaccgggtaagcgtttcagccacggcatcaacgatatccgaggcccaatgggcaccatcgtcgccagcggcggcggccagggcctgatgacagctttcctcgaacaggccaacggcggcttctatcagggcgacggcaacgatgcccgcgacccggtcagcacgatcaccgccagcggcagccagcagcggctggtgagcgctgaccttgcccagctgtcgccggatcaggaggccggcgcgctgcgcgtggctgctttcctggtgaagtactacggcaccggctcaaacgtgcctagcctgaccgacccggtagacaccatcaccactcgcgaccgcctcgcattggtcactgtccacatccagggcgtgccgtacgtgatcgtggatatcggcctgcgcatgctcaagccccacgaactgttccgggcacagggcttcccgaccggctacatcatcgatcgcactgcagacggcaagcctctgaagaccaccgcgcaggtgcgcatggtgggcaacagcgtcagtccgccgccgctgcgcgcactggctgaggcaaatctggatgcggccgttgcgccgctggcggaggctgcatga

SEQ ID NO: 537103 - DNA, 234 bp, Stenotrophomonas maltophilia
gtggctggccaggcgaacgacaacatcgagcagctgcaggccgaggtggccgaactgcgcgccggcggtagcaccagcaccacccggcacggtctggtcgccgacctggtaaccgccgcaactgccctcgggcaccacgaaacgctgcgcagcagcagcgacgaaaccatcgactactggcgcacgcgcgttgagcagctgagcgccgaactgacaggagaacaccatggctga

SEQ ID NO: 537104 - DNA, 141 bp, Stenotrophomonas maltophilia
atgacctacatccatccgaacgaccgggtctacgcgctggagcgtgccgtggccgccgctgccgcccagggcgaggaccgcaaggtgcaggacgacctgcgcgagatcctggccgaagcccggcgcgaggcccgggggtga

SEQ ID NO: 537105 - DNA, 603 bp, Stenotrophomonas maltophilia
atgtcgatgcttgacggggtgagccagtgctggctgctcagcgaaacctgtgtggtgaactgggacgcatgggctgcgattggcactgttgctgcggtgtttacggcggtgtttgcgccggaaattcagcggcttctcgtccgaaagaagacaaacgctatgtttgccttggcgtacaggacggacctgttcgcggcgctcgatacggttgaacgtcttcgcagccagtaccccttcggacaggggacgggagaggctttcgccgctgaggctttgctcttgaccgatgagagcttccgcgcagccctgacccaggatgcgaacgctcttgacgttctcatggttcgggatgtggatctcacgaagtggccgggagtggacgtccggctggcggccaaggttgctctcgcagtggaaaccaccaggaacctgcacaagctgtacaccaacctggcggtggccggtcgagatggcgatgctgggccctacttttatgtagccgagcacatcggcaagctcgccgcagagcatctttccgatgcgaacagcgatgttgatctggccatcaggccgatcacgaagagcgatcaggctgagatctga

SEQ ID NO: 537106 - DNA, 258 bp, Stenotrophomonas maltophilia
atgaaccgccacatcgcacgccgcgcgcccaaggagacgttgggcttcgcctggggccggtttccaaccgtcgacggcagcgccatcacatggcgcctgtaccgccgcgaccaccgccgcgcagtgcatatgcacgcgatgaccttcttcgcccatgacgatcgagctgtgatcgctggccacctgcgccgcgcgcgccactacctgcgcgacaaggtggacgacatcgacctggtggcgctgggggtggccgcgtga

SEQ ID NO: 537107 - DNA, 222 bp, Stenotrophomonas maltophilia
atgaccagcatccacgtgaagcccgtcttcagcggcgccaccgatcgagagaaggaacaggaccggcagaagctggaggcagacatggcgcggttcgaggccgccggcggaaaggtcgaaatcttgggcacaagcggcatcgacaagagcacgatcagccgccggcaggtggttgagggtggacacggtcgccgcggtggaaagaagggatcgcaggcatga

SEQ ID NO: 537108 - DNA, 351 bp, Stenotrophomonas maltophilia
gtggccggcgtcgaggacatcggcctggagcacctggtcctgctgcgcggcatcgtcactgccatcaaggaaggtgacaccacgccggaagatgccttcgccgccgaaggcgcacccgccgcccagaagaaggcgctaccggcctacaccgaagaagccttcgctgcggccctgccgcagtgggacgccgccatcaaggccggtaagaagacgcccgaagcggtcatcacgatggcgcagaccaagggcacgctcagcgacgatcagaagaagcagattctggcgctgggcgagaaggccaccggcgagcagcaggccggcccagccgtcgctgaggaggtggtcgaatga

SEQ ID NO: 537109 - DNA, 3066 bp, Stenotrophomonas maltophilia
gtgatccgaatctatccgtcgcgcctgcccggtgagccgctggagacgcacgcccacggccggaccactgtcgaggcgtggctgcaatccatggtgccgagtttcaccgcagaccgaccgcatcctattgaggtcgagctggatggcgtcccggtgccggccggagcctgggcgaccacctggatggacggtgattccgacgtccgtatctacccgattgcctacggtgagggtatcgctgccgtcgtgtactgggtggtagtggcggttgcggcagcctatgccatctacatggccagcaacatgccgtcgggcaaccggtttggccagggagattcgctcagcctggacaccgcgcgtgcgaacaacgcacgtctgggcagccctatccgagaggtgctgggccgctaccgcgtctatccagattacctggtgcagccggtgtcgcgattcgtcggcgaaaagtcctaccgaacccacatgttcgtctgtgttggcaaggggcagcacatcatcccggtcggctcggcgcgactgggaaatacgccgctcagctccttcgggaccgacgtgcagatgacgatctacccacccggcgcggatgtcagcggcgacccgcgttcagagaactgggtgaactccaccgaggttggggcgacggcttccggcaccgccggtctggatctgagcgacacggcagatgtgtcaacggggatcaacgcagactcggtgacggtatcggggaatgtgatcaccctgaacaacgcgacagtcaccgacgccaacggtaacgagcggccgaccagctctgtgcccagcagctgggttgttggcgccgtgctcacgctcaaggttgcggcgtccttcacagcgaccaccagcggcctttactcgatcatcgccggaagcgctgttgcggaactggcgccctacgtgggcatgccggtgctgctgacctacaacggtgccgattacgcgttgttcgtggccagctacgttcctggctcgcccgcagtgcccggtgttggtggcagtgctgcccgtgtgacgggatcggccgccgcgagcaacttcgacttcagcggttcccccgtcaccttcggtatcagctggcgcggcatcacttacagcgttgctctggaggccaactacatcaccctgggcgtgctgctaacggccatcaacgaccagctggtggacagcggcctggtggcggcccagtctggtggtgtggtgacgatcgctgaggcatccagcccatttgccggtgggagcattacctacagcggttttccggcctcggtgttcggcagcagcccaacgtccacgacgggtgtggccacgaccggtggaacacctgcgacgcagccccgtgtgacgttggcctacgacggcccgaccggcacggctttcggaggattgccatctggtgctgtgtcgctcgcaatgtcgcgtgggcagagcgattaccgcatcgcctcagtatctggcctgacactgtccgtgcagcgcctcacggaggccggcgtggtcgacactagctggccaggctggacgagtcgtacggcaaccgactacaacgccaccggctttcaggagggcgaggattggttggggcccttcctggtgtgcccgaatggtgaaacgaccgatgcattcgagtacgacttcaacttcccaagcggactgatctggtacaccagcaagggcaacaagcgcacctttaccgtttctctgcgagtcggctatcgcgtgttcggctccggcgcgccctggacagtgcgcacgcacacctacaccggatattcggaggatgccgtaggcttcaccgagcgcatcaccctcggcgcccctgggcaggtcgaggtgcgggttcggcgggtaaccgagcgcgggggcaattctgcacgggatgcgtgctactggcagggactgcgtgcgcgcctttcacaacgtcccacccgctacgacgacctgaccaccatcgggctgactgtgaccaccggcacgaagctggcggcgcagtcggataggcggttcaacgtgatggcgacgcggcagtacgagggcagcaccgcgcggaccatcagcggcgccatgaagcacgtgctgcggtccctgggcctgcctgaagatcagatcgacagcgccacactggatcatctggaggctacctactggacgccgcgaggggagttcttcgactacagccccgagcagtccggaagcagtgcactggacgtgctgcagctggccacgcaggccggcatgggctacttcctgctcagcgacggcatgtgctcggcagggcgcgaaggcatcaagacctggcgcggtgccatctccccgcagcggcagctggagccgctggccacgtcgttcactgcgccggggccggatgacttcgatggggtcgacgtgacctacatcgatgaggtgacctgggcggccgagaccgtggaatgccgcctgccgggcagcgacacgccgatgaaggtcgagacgttcgaactgaagggggtagggaaccgcaacagggcataccggatcggcatgcgcaggctgctgaagtaccaaggccagcgcctgacctacaccacgaagacggagctgatgggcctgcggttcgatttcggggaccgggtcaagttgaccgacgacatccccggctccagcaccaccagctgcatgatcgaccacgccgagctgcagggcacgcgcgtgctgatcgaggtgggcgagtacttggattggagcctggccgcgccgcgttgcctgatccggttccaggacggctcggcgtcggcggtgatcgtgcccacgcgggtggacgaccacaccctgaccatcgccgcgtcgtcgctgccggcggagcactccttcagcacctggatcctcgatgacccgaccatcgatccgccggagctgatcttctgcgacagctcgcgggtcggctacgacgcagtgctttccgagatcacccccggcgacgacggctcggtggagatcgcagcactgcagtacgacccggccttctaccagtacgacgacgcgaacgcgccgtaa

SEQ ID NO: 537110 - DNA, 378 bp, Stenotrophomonas maltophilia
atgaagatcaaccttgaaaagtaccttgacgtgcgctgggtgcgcggcggccgcgcgttccctgagctggactgctacggggtggtcaatgaggtgcgcagggatctggggctggaggcatggccggagtatgccggtgccacggtcgtgcaactgccggaactcgccgcaggcgcagccaccgagcgcaccggcagcgacctgcggcagggggccgtggccttctgctaccagggcagcgtggttgagcacgtggccgtgctgatcgaggcagatggccgcctgtgcgcgctggaatgcaatgagcaccacgacgtgacggtgctgcctgtggcgcgcttcgaacgccgcttcacccgagtggagtactacgcgtga

SEQ ID NO: 537111 - DNA, 480 bp, Stenotrophomonas maltophilia
atgagcatcctcgaacgcctgtattcgtccggtggccgtgaggtggagttggagacactggccatccaggttggctttcagaccttttacctgaccaagggatgggacgacatcacggccactctggagaccggcgaaaccgtgactttcactgcctgcggcatggatatcgccaagccggcacgaaatgcggatggagtgcaggacctacgcttcgccatcagcaacatcagcggcgtggtcagcagtcagatccgcgcggcgctggatgccaaggtggagatgatcgccacgttccgcctttacctcagcacggacctgctggcgccggcgcagcgtcccttcagcgtcgtcatcaagggcggccagtggacggccaccgaggtgcagatcaccgctggcttcatgaacgttctggacacggcgtggccgcgcgatcactacgtcctatcgaagcatcctggactgagatacatgtga

SEQ ID NO: 537112 - DNA, 465 bp, Stenotrophomonas maltophilia
atggcagctgcagttccctatccggcatggttacccctgccgctccgcgaaggctatgggttcaagcccgtcacgccactcctgacgtcgaggttccagagcggtgcatctctgacacgccgccggtccaccagcacgccctcgatggtgaccctgtcgtgggtgctgaaggatcgcgtggccgcgatgttcgagaagtgggtgcaggaggatctggtcgatggatcggcctggttcctttgcaaactgaggacccccatcggcgaggactactaccgagcgcgcttcactgcggacttctacaacggcccctacctggttgacggcgacttctggcggttcgacgccacgctggagatgttccggcggccgctgttggcagacggttcaaccgcataccccgacgcgatcttcaacgcggacatcgttgatctggcagcgaacagggagtggcccgaagtatga

SEQ ID NO: 537113 - DNA, 468 bp, Stenotrophomonas maltophilia
atggccgaagcaaagaccaatgcaggttccaagctccacatctgcgttaccccccagaacgaggatctgaccgtcgcccagttcgcggccctcacctacgtgcaggtgaagaaggtcggcagcatcggtgagcgcggcatcaacacgaacatcgtcagctacgacacgctggacaccctggtgtcgatgaagggcaagggcatcaccaacgccggcgacccacaggtagagatggccgaggatcttgcggatccgggccaggtggccatgcgggccgctggcgcgccgggtattccggacgcctacgcgttcaagatcgagaacaccgacggcaccgtcgagtacctgcgaggtctggtggcgggtcccaacaagcccggcggccgcaacgaggacttccgcctcaacacctacacgatcgcgctgaaccagcagccgatcgatgtgccggcgcccgtcaccccctga

SEQ ID NO: 537114 - DNA, 300 bp, Stenotrophomonas maltophilia
atgaagaggattctggcaggggcgctggtgctggccattgcaggctgcgcaaccgtgggcaaggaaatcagcgatgagtccattgcggccatcacgaagggcacaaccaccgaagcgcaactcgtcgcgcagctcggccgcccgacctctacggttaccaactccgatggcaccagggtgctggtgtggacctacgccaaggccaacggcctgggccgcgtgaatgggaagtccgtcagcgtagtgctgagggatggtgtggtggatagccactccgtcgccgaggtcaccacgccctag

SEQ ID NO: 537115 - DNA, 393 bp, Stenotrophomonas maltophilia
atgactgacctgagcaccatcgtcgccgccgcgcgaacgatcgacatcaagcacccggccaccgatgccccagtgggcctggttctgaccatccttcccgatagcagtccgcaggttcgtgctgcatcccggaaactgaccaacgagcgcatgcttggccggggcaagttgaccgccgagaagatggaagccggccgcatcgacatgctggtggcctcggtgggcggctgggagtggcagggcgacctcaacttccatggagagaagcctgccttcgaggagaagacattgcgcagtttgttcaaggagctgccctgggtagccgagcaggtggacgctgctctgggcgaccgcgccgagttctttcgcggagctgaccaggaagctggctga

SEQ ID NO: 537116 - DNA, 315 bp, Stenotrophomonas maltophilia
gtgccggacagcaacggcgaaacccgtcgcacccgcaacgagcgcttcggagagccctccccagatgtgagggtcccggagaggggcgaacatatctgggagtggttctggcagctctcggcgcgtcgtaggagcggtccggaggcattgacctttgctgacctcggggactggagccggctgctgctggtcgacctgctcccgcaggaggtggagatgctgatgaccatggacgacacctacctcagggccgtgcgggaagaccaggcggcagcccagcagcgcgccatcgaggaagcgaggagcaggaaatga

SEQ ID NO: 537117 - DNA, 282 bp, Stenotrophomonas maltophilia
atgagcggccccatccccgtctcggagattctggaccgcgccgggctggcactcgaagccgtagccgcggccaccatgctgcccggtgacatccagtgcgtgcaggacttcgaacaggcgcgcgccgcgctcgccgagttgatcgctgccgattcgcaatacgaccgtgcccgcgcggcatggctcgccgaccactccaagcacaacgaattcctcgcggcgcgcgaagcgtggacgcgccgcgtcgctgccctcgcccgcgtcaaaggagaaaccgcatga

SEQ ID NO: 537118 - DNA, 360 bp, Stenotrophomonas maltophilia
atggaccacaccgcccacaacacagccgtccgcgacctccatcccgaggcggacgttcgccgccagcgccggaacatcccggtcgtcatcggcaacctgaagaactcgggcctgcacatgcccggcgtggataccgcataccgtgcggctctgttcgctggtgccaccgatgagatggcctgggaagcggcccgccgccacgaactggccatgatcggcttccccgatgagatctccgacgccgggcttgacctgagcaaggccgagtcgatgcgcacgcgccgccaggcgctgatcgatacctgccgcgccctgcccaacccgttcgctctgggcgccgacgtgcaggtggctgcatga

SEQ ID NO: 537119 - DNA, 294 bp, Stenotrophomonas maltophilia
atgaccagcaccaccccggccaccggccgcatccagctgttcgacgtcgacagctcgcagatccacagcatcggccacgacaccgccaccaacaccctcgcgattcgcttctaccgcggctacggcgacaacaaggtgccggcggcggtctaccactacgccaacttcagcgccgaggagttccaggcgttcaaggacgccgaatccatcggcaagcacttcggcgcgtacatcaagccgttccccgagaagtacccgtaccacaaggtcgccgagcagcagcaggccgcctga

SEQ ID NO: 537120 - DNA, 270 bp, Stenotrophomonas maltophilia
atgaccatgttgaaagcgtacgccgtcaatgacagcgacctctacgccgcggccactgccgacgaggcggtcaaggcatacctcgaacactgcggcgaagacgtggaagtcgaggccggctatcccatcgagctctccgacgccgacatcgacaagcccatcccggcattcgatgaggacgagcagcccaccggcgagatgacctcgatccgccagttcctggccgagcacggcgatcagccgggctttctcgccagcagcgactactga

SEQ ID NO: 537121 - DNA, 294 bp, Stenotrophomonas maltophilia
atgaccagcaccaccccggccaccggccgcatccagctgttcgacgtcgacagctcgcagatccacagcatcggccacgacgccgccaccaacactctcgcgattcgcttctaccgcggctacggcgacaacaaggtgccggcggcggtctaccactacgccaacttcagcgccgaagagttccaggcgttcaaggacgccgaatccatcggcaagcacttcggcgcgtacatcaagccgttccccgagaggtacccgtaccacaaggtcgccgagcagcagcaggccgcctga

SEQ ID NO: 537122 - DNA, 168 bp, Stenotrophomonas maltophilia
gtgcacggcaactacctgtcgctgctgatggcccgtgcggtgctggccggtgccgtttaccagaccaccttggtgtggttccgcgccgagaaggcgctggccgagcgccgcagcggcatccagtccctgacctccgccatgccggtaccggcggaagacctgcagtaa

SEQ ID NO: 537123 - DNA, 264 bp, Stenotrophomonas maltophilia
atggaagtcgaggcccttgccatcgaaaccgatgaccgcgccggaggtcatggtgattcggccatccgcgccatcaatcgccagatcatgcaccacatcaccgttgatcggcggcccttggcgcgggaagcaccagcgattggaaaggtcgaacacatgcgcggcacccttggcgccatagaggtagtcatcgcgctccagaagcggcagcgactcatctgcggattcaacatcggtcgtgataacaagggtcatatcgtttag

SEQ ID NO: 537124 - DNA, 396 bp, Stenotrophomonas maltophilia
atgctggcggcgttgcagctctacacgccggtatggctctcgcagaccatggccgctgagctattcgtggaggcgcttgccgatacatcggtggtacaggcagtgcagcgcctgcgtgcgagtggcgacaccgtggaatgggtgcgtctggttcgagtgaatgagcttgcgtcggccgcagacgagattaccgtcaacctgtatgacgttgttctccaccttgtccgcgatccttccgtccctttgttcgaaaccgcggaagaggtcatgtaccgccctgatggtgcgcagggcgtccatcgcgaagttgtcacgatgcccagcgtgcaatggacgggaacggcgaaaagcacgtccccggatgcaaacccaagctcagccagccgcagcgcataa

SEQ ID NO: 537125 - DNA, 1848 bp, Stenotrophomonas maltophilia
atgacgactcacaacactgggaatccggtgccgtcggcggctgtcaaagatttgtacgacaacgcggagaacctggataagggcatcaacggtgacgagccgacctggactgatcgaaagggccgggtgcgcaagagcatggccggcgtcgagcaggactttcagcagttcctggccgatggcagcaccatcgagttcccgacgtgggcggcggcgagcgcggccgctggtgcagggcaggttccgcagaaccggcaggtggcggtaattggcgacacagggacgcacgtcgatccgatcactgggcagacggtccccaacagcggtcggttcgtcatggtctcagggggtctgcagttcagcagcgcggatgtgctgagccagaaggctgatcagtccgaggtggacaagatcgttgacacgggcgtcctggaagccatcgattccagtcttacctccagcgactacctgaccttcgcggtgcgagacgcgatcgatccgcgccgccggcgccgcttgggtcgcttccgcgcgcgcgacggtgcgctggacgccaagctggcattctcggtggacggcgtgatgcctctgggcgccggagccttggaaatgaccgacgagttcggagacgatctggagatcgttcgaactcgcaatggccgcgtggtgcgccgcgtgcttgctgatggcacggtcatcaactatgggaagagacaggggggcggttcgcagaacgaagtggtgctggcccgtggcacgactgacagcctttccgaccggctcagccccaccatccgggctgatggtctggctgttgacccgatctataacggccacacgctgagcgagacccggcgccttgtccaggcgattcgcgccggcatcgcaggaagccagttcgttatctccacgatcactgattcatggggtgacaaccggagctactggctggagcgatacagcctgcagctcaaggctcagttcgggaatgccggcgtgggtttcatgccggtcgaacggggcggtcctgacaccctcaccgggacactgagccgcaccagcgggtgggtcattgcgaaccgcacgacgcccgggcctggccttgtttccgcaacgtctagcactgctctggagcgcttcacaattaccggcggcaagggcgacagcgtgcgaatgtgctacctcggtggcaccgcgggcgtgatgcgatacaggttcgattctgggtcttggacgacggtcaacctggagggtgcgggcacgcagtatttgcagcttggagctccgccttccggggtttggacgatgaacgttgaagttgtttccggggcctgcacgatctacggattcgatgtaagagacacggcaacgctgggcgtcagaatcaacaagctcggtgccggtggatcgcgtctgtccgagtgggtatctcaggaccttgcgcagtgggccgcaggattctcgccgctgggctcaaacctggtggtgatcctattcggtacgaacgatgcctacaactactctgctgcagcctacgccgattacgcggcaacgctgattgatcgtatccggtcagcatcgccctgggcggacattgccctggtttccccgccgcagaatctcggcaccgctacggtgactcagaagcaacaggcctacgagcttcgtaaggtcgctgcggcgaagcgctgtgcccatgtggacctccagccgttctacggcgagaccacggcagcgtacgacggcaatgctcgcgactacatcaacgtcgccgacccgcatcacccgaccgagcgcggcggctgcatcctctccgaaatcatgcttcgtttcacggcttggagctaa

SEQ ID NO: 537126 - DNA, 141 bp, Stenotrophomonas maltophilia; identical to SEQ ID NO: 537104

SEQ ID NO: 537127 - DNA, 1767 bp, Stenotrophomonas maltophilia
atgatcaccgtcgaactgatccaaggcagcccggaatggcatgcccatcgcgcgcagcacctcaatgccagcgacgcgccggcgatgctcggtgcctccacgaaccactcccgctccgatctgatccgcgaactggccgcaggcgtgccgcgcgagttcagcgacttcgtgcaggagcgcgtcatcgacccgggccatgagttcgaggcacaggcccgtgctgtcgctgaggagctgattggccaggagctgtacccggtcaccggcgtctccggcaagtactcagccagcttcgacggcctgaccttgctcgaggacatcgcctgggagcacaagcgcctgaaccagacgctgcgtgaggccatgttcgacggctgcaccggtaccgacctgccgctgatgtaccagatccagatggagcaccaggcgatggtctccgcatgcgagcgtgtgttcttcatggcttccgaatggcgccagacctcgggcggctgggaactggtcgaggagcggcactgctggtacgcgcccaacccggaactgcgcgcgcgcgtcatcgcaggctgggcccagctggaggccgatgtcgcagcattcgagccgggccctgccagcgatcccgtgccggtgggccgcgccccggaaaccctgcccgcgctgagcatccaggtcacggggatggtcaccgcctccaacctggccgagttcaaggaaaacgcgctggcggtgctgggttcgattaaccgggaactacagtccgatgaggacttcgccagtgccgagaagacggtcacctggtgcaagggcgtcgaggaacggatcgaggcgacgaagcagcaggttctgggccagacagcggacatcgatgcgatgttccgcacgatggatgacgtggccgccgagacgcgcaagattcgcctggagctggacaagctggtggcgaagcggaaggaggaacgccgcaccgagatcggcaacgccgcgcgtcgcgcggtgatcgaccacatccagggaatcaacgaaacgctgggcgcgcatgccgttccgatgccggccacgctggtcgcggatctgcaggctgccatcaagggcaagcgctccttctccagcatgcaggatgcggtcgacgcggtagcgaccaacgccaagatcaccgccagccaggcggccgaccgcatccgcgccaacatcgccatcctcgccgagcacccggactacgccaccctgttcgccgaccgcgtgcagctgtgcgccagcaaggcgccggacgacctgcgcaacctggtggcggcgcgcatctccgagcaccagcaggcggagcaggcccgcctggacgccgagcgcgagaagatccgcaaggaagaggaggcccgcgcgcagaagaaggcagccgacgatgcggtcgctgcagcagctgggcaggccgctcaggcagcgcaggcggcagcggcccagcagcagcccgaaccggtggcggccgcgccggcagcgactgcagcgccggtgcgcaccgctcctacggcagtggccagcgtcccggccgcgaccgcctcgccgcgcgaggtcgtcaagatcaagctgggcgacatcaacgcgcgcatcgccccgctgtcgatcagcgccgatgggctggccacgctggggttcaagccgatcaacgccactggcgctgcgaagctctacgaccaagcgcagttcccggagatgtgccgggccatgatccacggcctgcaggatgcggccaaccagtacccgctggccgcgtga

SEQ ID NO: 537128 - DNA, 258 bp, Stenotrophomonas maltophilia
gtgagccgtcgcctgacctacatcctcgcgccgctggccatgtgggcgctgatctgcggcttcgcagcggccggcgtcctgctcgccgtcgtgcacggcaactacctgtcgctgctgatggcccgtgcggtgctggccggtgccgtttaccagaccaccttggagtggttccgcgccgagaaggcgctggccgagcgccgcagcggcatccagtccctgacctccgccatgccggtaccggcggaagacctgcagtaa

SEQ ID NO: 537129 - DNA, 141 bp, Stenotrophomonas maltophilia
atgagcttcgaacaggccatccggaaggagacggtgcgcatgtctctggagttcatcgcctacggcgcggtgatcggtttcatcgtcggcgccgctgccgtgctgatcttccaggacatgttgcaggcggtgatgtcgtga

SEQ ID NO: 537130 - DNA, 1848 bp, Stenotrophomonas maltophilia
atgacgaccttcaacactgggaatccggtgccgtcgactgctgtcaaggatttgtacgacaacgcccagaacctggatgccggaatcaatggcccgggacaaacctggcttgaccgaaaggggcagacgcgcaagagctggtctggcatcgagacggacttccaggcattcctggccgatggcagcaccatcgagtttccgacctgggcggctgcaagcgcggccggtggtgcgggacagatcccgctgaaccggcaggtggcggtggtgggtgacacgggcacgcacgtagatccgatcaccgggcagaccgtaccgaacagcggtcggttcgtcatggtcgcaggaggactgcagttccggagcgcggatgtgctgagccagaaggcggaccagaccgaagtcgacaagatcgttgataccggggtgctggaagccatcgattcaagcctcacctctagcgactatctgaccttcgcagtgcgtgacgcgatcgatccgcgtcgccgccgccgtctgggtcgtttccgcggaagtgacggtgcactggatgtcaaactggccctgtcggtagacgggaggttgccgctgggggcaggctctatcgagatgaccgacgagttcggggatgatctcgagatcgttcggacgcgaaacggccgcgtggtgcggcgagtgctcgccgacggcacggtcgtcaactatgggaaggggcagggcagcgatacgcctgctgaagtggctcaggcccgtggcaccactgcaagcctgtcggaccgcctgagtccgactattcgggctgacggacttcctgcagatccgatctacaacgggcataccctgagcgagaccaggcgccttgtccaggcactgcgcgccggcatcaccggaagccagttcgttatctctacgatcaccgactcatggggcgacaaccgcaactactggctggagcgatacagcctgcagctcaaggctcagttcgggaatgccggcgccggtttcatgccggtcgagcggggcggtcctgacaccctcaccgggacactgagccgcaccagcggatgggtcattgcgaaccgcacgacgcccgggcctggccttgtttccgcgaccaccagcactgctctggagcgtttcaccattaccggcggcaagggcgacatcgtgcgtatgtgctacctcggcggcaccgccggcgtgatgcgatacaggttcgattctggggcatggacgacgatcaacctggatggtgtaggcacgcagtatgtgcagctgggaacgccgcctgccggggtgtggaccctgaacgttgaagtggtttccggtgcttgcacgatctacggcttcgacgtccgggaatcggcggcgctgggcgttcgcatcaacaagctcggcgccggcgggtcgcggctctctgagtgggttgtgcaggatctgacgcagtgggcagcggggttctcacctcttggatccaaccttgttctggtgcttttcgggccgaacgacgcctacaactattctgctgctgcgtatgccgactacgccgcgacgctgattgaccgtatccggtcagcatcgcccttggcggacattgccttgatctctccgccgcagaatctcggcacggccacggtcacccagaagcaacaggcctacgagctccgcaaggtcgctgcggcaaagcgctgtgcccacgtggatctccagccgttctacggagagaccacggcagcctacgacggcaccgctcgcgactacatcaacatcgccgacccgcatcacccgaccgagcgcggcggctgcatcctctccgaaatcatgcttcgtttcacggcttggagctaa

SEQ ID NO: 537131 - DNA, 801 bp, Stenotrophomonas maltophilia; identical to SEQ ID NO: 537101

SEQ ID NO: 537132 - DNA, 468 bp, Stenotrophomonas maltophilia; identical to SEQ ID NO: 537113

SEQ ID NO: 537133 - DNA, 657 bp, Stenotrophomonas maltophilia
atggtggaagagcgcgtcccgttgacggtgcatggcatgtcggtctcgggcaattgccacaaggtacgcctgctgctggagcagctcggcagccgctaccgctgggtggaagtggacagtgcccatggccagacccacaccgctgaattccttgcactgaacccgaatgccaaggtgccgttgatcgtccgtgacgacggccgcgtactgaccgagtccaacgcgatcctgttctggctggccgaaggtacgccgtacctgcccagcgacggctgggagcgcgcgcaggcgttgagctggatgttcttcgagcagtacacgcatgagccgtgcgtggcggtggcgcgcttcatccgtggctggacggccgccgattcgccacgacgcgccgaactgccaaggctgcacgagcgtgccgccactgcgctggcggtgatggaacagcacctgcggcaggcgcagtggttcactggcagcgagtacggcatcgccgacatcgcgctgttcgcctacaccgacgtggccagcgagggcggcatcggcctggcaccgttccccgaggtgcgcgcctggctgcagcgcgtgcgagggcagccgcgcttcctgccgatgccggcggtgactgccgaggtgcgcgcacgcttcgacgccgcgtga

SEQ ID NO: 537134 - DNA, 306 bp, Stenotrophomonas maltophilia
atgaccacggaacgtctgacggccgcgatggccgagagcatcacccgctcgaaggatccgagcttcgctgtcgacacgatcttgcagggcgtcgaggccgctgccgaagccgggaggcgtgagttcatcactcgcaattacggcttcggcgatggctcctgctacacgaccgaggacaagttcccggcgctgtgcaaggccatcctgaaagaactgcgcgacctcgggttcaaggccgatatcggctccagctgcggccagttcgtggacgtttggctgtacgtgcgctggggtgaacaggcatga

SEQ ID NO: 537135 - DNA, 219 bp, Stenotrophomonas maltophilia
atggcaaatggactcaagctcagcgatgggcgcctcatcaacgccgacttcatcgtcctggtcagccatctcgtcatcgacgaagacactgcggccttcaacattgaattcagcaattccacgacgatcctgatttctggaagtcaatcggcagtcatgcgcgatcacaccgacgttcgcagggcgatcgggatctcggatctaaacagcatccgctaa

SEQ ID NO: 537136 - DNA, 1071 bp, Stenotrophomonas maltophilia
atgacaagccaagaaaaagcaattaacgaaattcgttcatccctactatcacaagagctcgtcgttattactggaacaggggtcagtctagctctcgcggaaaaggaagcatatgaaatactttcttggaaaggcctagttaaatcgggcctccatgaagctgtgagtcgcggcgtacttgagcaaagtaagcttcaacgctggctggagcaactcgattcaaacgatattgatgaactcctaagcgcagcggagttcatgggacggaagctcgatgcgccggcaggccatctataccagagatggttcaaaaattgtttcgactccattagtccgctcaacaacaaaatggcgagcgctctaaggaaattatctaacagtcgccctctgatggcgacactgaattatgactgccttctcgaagaaataacaaatcgtccaacattggatctgtccagcactcaatcaactattaaatgggcacgaagagagtctaacggcattctgcatcttcacgggacatggacagagcccgagaactgcattttgggaattagagactaccaaaagaccgtcaccagtgacaccagggatctcgcgcagagattcatttcatcattcaagaggattctcttcatcggatgcggagacactttccaggatcctaatttttcgaacttggtgaagtggctccgaagtgagttgcggggcaaccaaccacaacactttgcgttgataagaaatgctgaaaaagcgcagcgcctacgcgatgaagcatggcaggggttcgtggatccggtatgttttggagaaaactacgatgacctgcctgatttcattgagagacttctgcatggaatccctgagaacagcgctccagcacccacacctcatcccagccacgaaagcaccctagacgcatatactcgatttctaattagagattgcggacaaatgacaatcgaaggaataaaagccgaccttgatactgctcaaagaaaattcgatatcgagcggctttttgttccactatctgtcgcgccatgcccccccttttatcgcgacaaatga

SEQ ID NO: 537137 - DNA, 492 bp, Stenotrophomonas maltophilia; identical to SEQ ID NO: 535447

SEQ ID NO: 537138 - DNA, 963 bp, Stenotrophomonas maltophilia; identical to SEQ ID NO: 535448

SEQ ID NO: 537139 - DNA, 633 bp, Stenotrophomonas maltophilia
ttgagccgtgaccggcagcggcatcgcaccggcctgctgggctggttgtggcggctgttcgtggtgctggtgatctggctgctgggtgtgacggcctggatcgtctgggtgggcgagcgtgaccaggcggccaaggccgatgccatcatcgtgctcggtgcagcggcctatgacgccaagccgtcgccggtgttcgaagaacgcatccgccacggcctggacctgtacgaggcccggtacgcgccgctgctgatcttcaccggcggctatggcggcagcggcgcgcgcttttccgaatcgcaggtggcgcggcgctacgcgctcaagcacggggtgccggacgacgcgatcctgatcgagaccgcctcgcgcaacaccgtgcagaacctggtcgaagccaagcggttgatggaccagcgcaacctgcaccgcgtgatcatcgtcagcgacccgctgcacatggcgcgcgcgctgcgcctgagcaaggcgctgggtatcgatgcactggcctcgtccacgcccagcacgcgcttccgcagtttccataccagctggcgtttcctggtgcaggagatctatttcttccaccgcgacctggtgcgcccgccgctgagttcaccagccaatacctga

SEQ ID NO: 537140 - DNA, 885 bp, Stenotrophomonas maltophilia
atgccgtcccacttcgatgcccgccacgtccgccgcgcgttcgcccgcgccgccaacagctacgacgccgccgccgccctgcagcgcgaggtgcagtcgcgcctgatcgagtcgctggactacctggaggcacgcaagcccgaggtggtgctggacatcggtgccggtaccggccacgccagcgcgctgatgaagaagcgctggccgaaggcgcaggtgatcgcgctggacgtggcattgccgatgctggaccaggccaagcgccaggccggctggtggaagccgttccagcgcctgtgcggcgatgcggccgcgctgccgctggccgacaacagcgtggacgtgatcttcagcaacctgtgcctgcagtgggtggacgacctgcctgcggtgttcgccgggttccgtcgcgtgctcaagcccggcggcctgctgctgtgctcgacctttggcccggagacgctggtcgaactcaacgaagccttcgccgctgccgacgatcgcccgcacgtcagccgcttcgcacagattgcccagttcggcgacgcgctgatgatggccggcttccgcgacccggtgctggaccgcgacctgttcaccctgacctacgacgatctgccctcgctgatgcgcgagctgcgcgcgatgggcgccaccaacgcgcggacggaccgccgccacacgctgaccgggcgtggccgtttcgctgcggccgccgccgcgtacgagccgatgcgccgcgccgacggcaagctgccgagcagctgggaagtgatctacgcccacgcctgggcgccggaccccggtgccccgatccgcgaaggcgggcatgacgtggcctcggtaccggtgtcggcgattccgatccggcgcaagcagacgtaa

SEQ ID NO: 537141 - DNA, 780 bp, Stenotrophomonas maltophilia
atggatctgggtatcaacagccgctgggcactggtctgcggcgcaagcaaggggctgggcctgggctgtgcgcgggcgctggcaagcgagggcgtcaacgtggtgatcgtggcccgcggcgaggcggcgctgcagcacgcggccgaggaactgcgcgccctgcccggtgcggccgaagtacgcgccgttgccgccgatgtcaccaccgaggccggtcgcgctgcggcactggccgcgtgcccgcaggtggacatcctggtcaccaacgccggtggcccaccgcccggcgatttccgcagcttcgagcgcgacgactggatcgctgcgctggacgccaacatgctggcgccgatcgcactgatccgcgccaccgtggacgcgatgatcgatcgccgcttcggccgcatcgtcaacatcacctcttcggcggtgaaggccccgatcgacatcctggcgctgtccaacggcgcgcgcagtggcctgaccggcttcgtcgccggcctgtcgcgccgcaccgtggcccacaacgtcaccatcaacaacctgctgcccggccagttcgacaccgaccgcctgcgcgccaacttcgcgcacagtgcgggcaaggacggcgacgccggcgaggtggccgagcgccgccgccagcagattcccgccggccgcttcggcacgccggatgaattcggcgccgcctgcgccttcctgtgcagtgcacaggccggttacctcaccgggcagaacctgctgatcgacggcggcgcctaccccggtacgttctaa

SEQ ID NO: 537142 - DNA, 1044 bp, Stenotrophomonas maltophilia
atggctgctgccatccgccacgactggcaacacgacgaactgcaggcgctgttcgatctgccgttccccgagctgctgttccgcgccgcagcggtccaccgcgagcatttcgacccgtcgcaggtacaggtctccacgctgctgtcggtgaagaccggcggttgcccggaggactgcgcgtactgcccgcaggcgcagcgctacaccaccggggtgaacgcgcagaagctgatggacaccgacgcggtgctggccaaggcgcgccaggccaaggccgccggtgcatcgcgcttctgcatgggcgccgcatggcgttcgccgaaggaccgcgacatcccgaaggtcgcggcgatgatcgccggggtgaaggcattgggcctggagacctgcgccacgctgggcatgctcagtggcgaacaggcgcgtgcgctgaaggatgccggcctggactactacaaccacaacctcgataccgcgccggactactacgattcgatcatccacacgcgccagtaccaggaccgcctggatacgctggaacatgtgcgcgacgccggcctgaaaacctgctgcggcggcatcgtcggcatgggcgagacgcgcgcgcagcgggtcggcctgctgctggcgctggccacgctgccggcccatcccgactcggtgccgatcaacaagctggtgcaggtggcgggtacaccgctgcacggcagtgccgagctggacccgttcgagttcgtgcgcatgatcgccgtggcgcgcatcgccatgccgcgctcgatggtgcggctgtcggccgggcgtgaggccatgagcgacgaactgcaggcgctgtgcttcattgccggtgccaattcgatcttctacggcgacaagctgctgaccaccggcaacccggaaagcgagcgcgacctggccctgttcgcgcggctggggctgcagccgatggcggtgcaggtggatgccgagggccacgaccacgggggcaccgtgcacgccgacatcagcgccgatgcgcccggctgcggctgcgctcacgcggcctga

SEQ ID NO: 537143 - DNA, 1341 bp, Stenotrophomonas maltophilia
atgattgatctttaccgcctccgcggccgtatcactgcgctggtcctgagcgaggcctggcgccgccgcgccgcgctctggggcggcgccgtggccgtggcactggtggcgatcctgttcgccaaggccagtgatgcggccttccatctgttccagcgcattacctcgcactcgccgtggtgggccctgctgctcacgccgggcatcttcgcgctgctggcctggctgaccagtggcgtgctgaagcccacgcgcggcagcggcattccgcaggtcattgctgccctggacaagccggacgcgtcgttccgggaggccaacctttcgcccgccgtttcggccggaaagctgctgctgacgtcgctgtcgctgctgggtggcgcatcggtggggcgcgaaggccctaccgtgcatgtgggcgccagcctgatgtacctgttcggccgctggttcggtttcaaggacccgcgcgagctctcgcacttcctgctggcaggtggcgcagccggtatcgccgccgccttcaacaccccgctggccggcatcgtctttgccatcgaagagctcagtggccgtttcgagcatcggttctccggcacgctgctgaccgccgtgatcgtcggcggcgtggtgtcgctgggactgctgggcaactacacctacttcggccatgtaagtgcgcggttgccgctgggccagggctggctggcgatcctgctgtgcggcgtggtggctgggttgctgggcggagtgttcgcgcgtgcggtgctggccagtgcggccggtcgtccgcgttggctgggccagctgcggcaacggcatccggtgctgctggccgccggatgcggcctggtggtggtgctgctggcgctggtgttcggtgaaggtgcgttcggtaccggttatgagcaggcgcgcagcctggtgcagggccaggcgctggtgggccacgaattcgggttgatgaagctgctggccaatctggcgtcctatgtcgctggcatcccaggtggcctgttctcgccggcgctggcggtcggtgccggcctgggccacaacctggcggtgttgatgccgggcgtggaccctcgcgcgttcgtgctgctgggcatgtgcgcctacctgaccggcgtgacccaggcaccgctgacctcggcggtgatctcgctggagctgaccgacagcggtgatctgctgttgccgatcctggccacggtgctgatcgcccgcggtgtgtccgggctggtatgccgggtgccgatctatcgtgggctggcagagctgctgatgcccgcggttgctgcaccgcccgatcctgcgaaccgcgaacagacgcgctag

SEQ ID NO: 537144 - DNA, 762 bp, Stenotrophomonas maltophilia; identical to SEQ ID NO: 535446

SEQ ID NO: 537145 - DNA, 918 bp, Stenotrophomonas maltophilia
atgagccgcaagttcgactacctgggcgatgtggaggtgttcctggcggtggtcgagcacggctcgttcacggccggcacggtggcgctgtccaccacgccctcggtgctgagccgcgcggttacccgcctggaagcgcggctgggccgtcagctgctgcagcggaccacccgccgcgtgggcctgaccgacgccgggcggctctatctggaacaggtgcgcaccgccttcggcctgctggacgacgccgagcgcgacgtactggcccaggatggtgcgctggccggccgcgtgcgcctgagcgtgcccaccacctatggccactaccggctgccgcccgtgctggcgcgctttgcgcagcagtacccgcaggtgcaggtggaactgaacatcaccaaccgcaacgtggacctggtggccgaaggcttcgacctggccatccgcctgggccagctgccggacagcgggctggtggggcggaagctggaggatgcgcctttggtgctggtagcttcgccggagtacctgcagcgccagggtacgccgcagacgctggacgacctgcagcagcacctgtgcctgccgttcgtgatgccgcgaactgggcggctggcgccgtggatcttccgcgatggcgaccgcgacgtggactggctgccgcgttcgtccatcgagacgtccgacgatgtgctgggcgtggtgtcgctggccgaacagggcatcggcatttgccagagttatgagttcatcgtgcgcgagcggatgcagcgtggccagctggtagaggtgctaccgcagctgcgggggagatcgcggccgttctcggtgatctatgcgccgcatcggcggcagtcggcggcggcacgggcgatgattgagttgctggtggggaatgcggctgaggctggcgttggctga

SEQ ID NO: 537146 - DNA, 633 bp, Stenotrophomonas maltophilia
atgtgcctagcttctggcaggtgggaattgtttgccgatcacacggtggtcgaggtgatacctacgtggcgacggcccaccccgcaatttgaagacttcttctctgacgcagagctggccgctttggatttgggggaggcagcggtgccacagcttgtgtggagcaatgagcccctactcctcaatggtccagtcagtaagggggaagcgagtgcctgggtgacctggtcggataaagagaaccggatcaacttgaatccctacgattgcctgaagaagtccttagttcagtggcggcgaacactcctgcatgagctggggcatctcatcagctaccccgtgttgtttaacgacgcctctacagggcacgacttcgcatttgcggtgacgtttgccgcgtgccaggtgaggatcgggcttccccttcggcttagagcctacgatttgtcggacatacctccagcagaacgagaaacaatgacccgtcgcgccgaggagctcggggaacgatttgggtctgactcaatggaccttttccacatccctcgccttacctcacgcatagaagctgcagctcaaagtaagggctgggaccgcgcgatgcgggcaccgaagcggtttgggcttttttga

SEQ ID NO: 537147 - DNA, 1404 bp, Stenotrophomonas maltophilia
atgtcccatcccgtcatcattcgagccaaaaagctggccaccttgggccaggtgtctgcgtccgggcaacacacctggcgcgaacggcccacccacaacgctgacccggcccgcacgcctggtaaccaggatcttcggtcggtcaccagcgcggccgaactgcgtgcggcggtggagcagcgcctggccacggtcaccgagaagacggcccccaagccggtgcggtgcgttgagtacctggtaaccgccaaccacgatgctttccgcgagaacgggggcagcgtggaccatcaggcctacttccgtgacgccatggcgtggatcgaaaagcggcacggcgcggccaacgtggtggccgccaacgtccagctcgatgagcacaccccgcacctggtcgtctacgtcgtgcccctggtcgaaaccgaggcccgcgagcgcaagcgttcggtcatcgtcggcaccaaccccgacggcaccaaacggcgcgagacgcgcaccgagcagcaggacgccggcgtgcgtctgtcagcggcccactacctggatggccgggccaagctgtcgaagctgcagaccgactttgccgcgcaggttggccagcgacacggcctggtgcgcggcgtcgagcgcagccaggccaagcacaccaccgtgcgtgagttctatgccggcatcgagcacgccgaccggccgaaacagccgatcccggccaaagccctggagccgcgtgtgatcgagccaggcgggttcctgaagaagcccgttgtggagtcgcccgaggaggtcgccgatcgcctcaccatggctatgcgcaagctctacgccccgtctgttgccgccgccggcggtaccgccctggagcgcaaaaagcgcctgcaggcggaggccacggccaaggcgaaggtggcccaagtcgaagcacttgggccactggccgccgcggtaaaggatctcccgccggcccagctcgaacagttgatcgagcacgcccaggggctgcagcgtgccgcgcagctcgccgtagaggccgcgcgccgcgcggccgagttcggccggctgctggctagaaacgcgacgtcagccgcggggcgctatgcgcgcgccgccctagaggcgatcaaggccgccggtgaccacaagaatgtcgcttgggatctggttgatgggcagtggcgggaggtggccaagagcggccgagacggggccgaattgagcgagctcacggtggtgcagacgatcttggagcattcccctgaccactccgcaattaaggccaatctggacccaacacgccgctctgcaatgctggcccaggccagggctgagccggtgcgaagtttcgttcgcgccgatcagagtgacgctgaatctgtcttgcgggatggcccaaagttgggcggctga

SEQ ID NO: 537148 - DNA, 498 bp, Stenotrophomonas maltophilia
atgagcctccctgcttcccgaaaacgcatcgagtatgtgcagctctatcgctctgcgatgacggcccttcgtcagctagcccttgaggcgccaacggctcacgcagtgctgtacgtgctgatggaacggatcaacgagcgcaatgctttggtagccagctacgcgacgctgtcaaagctcacagggaagtctcgtgccacgattaccagggcgatggcagagctacgtcagcgcaactacatcgaagtggtgaaagccggcaatgtgtcggtcatcgtggtcaacaagcgggtggcttgggcaacagagaccgcgctccgaggcaagctggcagtgtttgatgcccgcgtcatcgtctcttctgaagagcaggacgagccagaacgtatcgggaaagaaccagacctggttagacttccccccgttttggtcccacccgagatggctacgatgcttgacgatggagaggacgatggccaggcagatctgcccttgtaa

SEQ ID NO: 537149 - DNA, 498 bp, Stenotrophomonas maltophilia
atgaacctcttcctcgacacggaatgggctgatccgatcggctccgagctcgtgagcctggcactggtcagtgaagacggcgcacgccagttctatgccgagcgagatccgctaccggcgtcgcccactgatttcgttcgccatgccgtctacccgctcctgcagggcggctcggccgcgatgtcggacatcgacatgaccaaggcgttgcgctcctttctgagcgccacccccgcggcctgcgtgttggccgactaccccaacgacctgcagctactgcagtacgtgctggccgggttcgacatggtcgatgaccaggcgcaggcctgcggcccggttcctgaggtggcagtgcagatcctggccagccgccgcatccgcgctggcatcgagagctggttccaggaaaaccccagccagcgtgctcgccggcatcacgcaatggtcgatgctcaggcgctacgcgccgcatggatcacctgctatagccagggctaa

SEQ ID NO: 537150 - DNA, 249 bp, Stenotrophomonas maltophilia
atgggcgtaacggaaaagaccatccagaccaacatcagtgccctagagaaggctgggatcatccgccgcgaatatcggaagactgcttctggtgacttcaatagcaacatctatcacttggatggtctgatcaccaaggtgagagagatcgagccgggcttcaccgccgaacgccagctacgcagggaaaaccggtccaagttgcagtcacctggaggcctcgaaaagaagccgaagtcggctgagtag

SEQ ID NO: 537151 - DNA, 390 bp, Stenotrophomonas maltophilia
gtgcggattgagtactcccatcactgcttctcccaagatccggagaagttagagacttacgatcctgaacatctctatctctgggaagcgcgccccaacgatccgcgggtcttttgccctacgcgttgggaagcaagcaagcttctgccgggccttgtcgaaaatttggatgaaagaaattgctatccaacgcgaagagacaactacttcgcggtgaagagggatctcccctctggccactacgtgctgtatttccgcgctgagcgtaagttcaccggcggcgcggatgtcaggcttttcgtggaaagtgcgtaccaccgtgatgacatggatgacgccatcgcgaacgctgaaaaaaccagcatcatggacatcttgctcaaggcctag

SEQ ID NO: 537152 - DNA, 312 bp, Stenotrophomonas maltophilia
atgagcaccaataagcgtagcactcgcctttccgactacacccagtccgacgccgacgacagcctggttctgcaagtgtgtgatgccctgcaggcgatcgcagcgaagctgcagttgcagatagagaccgcgctcgctgtggtacgggaaggcactgtcagcatcgagccccggcgcgcctatgactatttgctgggcctattccatgccctggcgttccaagggcagatcgatgatgaaagctggtgggagatcgatgcccagctcgaccgcctcgacatcgaggctacccccatcccggcggccccataa

SEQ ID NO: 537153 - DNA, 144 bp, Stenotrophomonas maltophilia
atgcgtggcaagcgcgagcagatcacccatacgatgccgccagagatgctggtccagcttgatcggcgggccaaggctctgggtatcccccgtgcggcatatatcaacctggcgctgtccaaggcgctggaaagcggcgtgtaa

SEQ ID NO: 537154 - DNA, 192 bp, Stenotrophomonas maltophilia
atggccttggcgacccaaacaattcccggcctgcaggcgttgcaggtgcagatccgccggcggaagtcctacaacaacgccgccgctgacgggctggctgtgaccgaattcaggccccgtgacactaaggcgatcgaggaaatcgaagcactagtggattcggtgtttaacaatgaaaaggcaatcaaatga

SEQ ID NO: 537155 - DNA, 1497 bp, Stenotrophomonas maltophilia
atgcgtgagctggttgcctggctccgccacgatcttctgctcgcaacgctggaggactttgatggtcagtctgcggcgcagggagtgtggttcgaggagatcatcgccgacgccatcgcggtgcttggcatgcgcgagatcggccgaacgctgttgactgaactggctggcgatctggctgtgaccggaagatcgtcgttgttgtggcgagtcattgcgcagaaccaggacgctgcccggcaggagctgcagcagacgctcaaggcggctgaggccggagccaacaccgttctgtctgccgcaggtgcgagctgggcggcctttgtgtccggaacggcgcatctgaagaccttcatctccaactatcgcaagctggaggctgcgcagaaggaggcagtggcccccaccgccagtgcccgcatccttcgcaacagcggcgttgatcgcttcgtcactaccgcaggtgcctaccttctgaatcgattcccgatgaagggcatccaggacaccgccggcaatgccatggtccggttcgtgcttctgacacgggcgttgatggagcgcgatgaggccatcagcctggtggccgaagaactgagcagcggccagcagggcaagcgctacttcctggagcgtatccagttctatcgcgccaagggcagcgcgctgccgatgcagttcgcgcttcgggacctggagctgcatcacggcgcgctggcgatgcgcaagcgttggcaggctgcggcagaaagcagccgcagcgtagtgcgcctgaactcgctgaccggcgtgctggagatggtgaacttcatccacctggccacgaaggtggacaagcagacgcgagactacgcgacgttattggcttctggaatgtcgcttgtggctgtgtatgccggtgtacacgaggcggtggcgaaggagttttttggtgtgggtagcgccagtgccatacggatgaagattgccgggagcgtgatggcgggggcgggtagttttattggggcgtactacagcttggacgaagctgatggaactgtgaggaaaggcaactacgttcatttcacagcgctcttggtcaagggcggggcggcaggagcagtcgggtctgctcattttctgacggcgcttgcctattcttcgccggtgatcgaacggactgtcgggagaaatgcactaactttaggcctaagagggctgcatgctggacttgaagttgccgcaggaagggaaggcggacatatagtcgcatcgcaagcaatgaaacgtgtcggcgtgtggatcttgcgattgagtggctgggaggtggctttgactctgctggctattgaggtactgatctgggcgatcggcccaaacgagctggagaaatggtgtgcgtccaacgcctttgggaaaagggctgagaagaaggtaggaagttcttatgcaacagcgcgggagcagcagctggcatttgagaaggctctcggtgtcgtgtctgtgagggtgcaatga

SEQ ID NO: 537156 - DNA, 834 bp, Stenotrophomonas maltophilia
gtggcgatcaccgatgccaatggccaggtgatcgagcgcacggtgtacgagccgtatggggcggtggtcaaccggccgttgacggatgggccggggtataccgggcatgtggcggactcggagacgggtctgagttatatgcagcagcggtacatggatccggcgttaggggctttccttagcgttgacccggtaacggttgaaggcggcgatatgcgccacttaaaccgctacgcttacgcttacaacaacccttacaagttcaaagatccggatgggcgctgcccccagtgcttgtggggggcgccaattggcgcagttgtgaacatcggtgttcagatggctatggcggaagggtcggtgggcgaaagattctcccaagtaaaatgggggcaagttgctgtcgcgacagcggctggcgcgctaagtggtggagtaagtgccattgcaagcaccgccgccactactggtggaaccattgctgcaaacgtggttggaaatgcagccgtcggtgcagtttcagcccaggcaaatgcacagcttgacggaaagaccgcttctttatccgaggttgcgaagggtgctgccttgagtgggggaacggctggcttaggggcagctgtttctgccgcgcctggcgtagcggctagaagtgcgagtgctggaatgacgcagactgagcgagttgcgacaggaaatctgatgcaaggtataaaggaagctactcctgggtttaaatactccaatcccgtccaaacagcggccaatgccgtcggtgcggcggtcagttcatcaggcgatcttgagccacttgtaaacgataagttgaagtag

SEQ ID NO: 537157 - DNA, 759 bp, Stenotrophomonas maltophilia
atgccactatgtggcggggctgcatcgatggaagggggatacatggaacgtacgaaaaagacactgacgatggccgatgttgctggatggggttcggtgctcgtcacctttggattgattcaaggggccttctatctgaaggcgtattggggacacttcggcctggatccctttcagtttgtcgcggtaagcgagcttgcgctggcagggcttgctgggattggcatggtgttgttctacattctgattgcattgctgtttggagggtggatcgaagcgaaggtgacggcgagtacgcccaaaaccagtcttctgatgtggctgattctggttctttgtcttgttggaatgggcgctcttctctggtggtcgagtggatggcccgttctgataggtgtggcgctgactggcacatgcgcaatcgcagtgcgactttccccagtgctgccacccgccgtgaaagactcgccgtggctggtctatgtcctcgtgatgcttatttatgtcccgatctcatcaaactggcttggcattgagcgcgcaagtgcgatcacttctggcggcagcaagtacacgaccaatgtgactattgatgagagggtgcagggaagcctgagcctagtggggcgactgggcgatagctatgtactttgggacatggcacagaagacagcagttcttgtgcctgctggcgatgtgagcagactggagatcgcgcgaaaaccagttttacctgtcgagtcagtccagtcgcgatga

SEQ ID NO: 537158 - DNA, 252 bp, Stenotrophomonas maltophilia
atgccctatatcggaatcggactccacgtaatggcagccatcttcgcgatgcacgccatccgctcgggtcagatcctctactggctcattctgctcttctcgttcccgttgcttggcagcgttgtctacttcctggcgatctgctttccggaagtccgccattcgcgcggggggcggcaggtcgtccgccatgcccgcagccacaatgccgcagggttggagcggaccaaggtcgcgttgaaggcctactga

SEQ ID NO: 537159 - DNA, 723 bp, Stenotrophomonas maltophilia
gtgaacacaaaccaaaagagcgagcttgctcgcgccatagcatggatgctttgctcccatgcagcacatggcctctcaacggcatccattaaaggcgttggcgaaataacactgcgcgacggattgatagtcgccgcagcagcgattgggtccaaacataagaatgcctggttgttagagcgggaggtagagccggatggctggtccgactcaaacgtagatcttatggtttacagggtttcgggagagaataagtcgctggttggtggaacggagctgaagtggtggcgccagaaggacaagggtaacgcaagcaataggcgccgcgacctgatcaaagatcttttaagggcggcagctctatacacgctctccgagtccttctcattcgtggcacttttagccacaaaggagtcatgggacgcaactacagatactcgtggaaaagacaaggctcttctggacaagctgaagtctgaatcctcagaacattggaatattagagatctatccagcagtccctccatcaaagccgccgttcgccttctgcgtaacaaggttcccgtaactacagcattccgaacaaagcttctgactgcatgctccctgtcagatcaatctggtattgaatgcgtcgctagggtttgggaggttcagaaaacacagaacagtcgctgggctgttgatccggatgatttcaacttcattcaggactcggtgtag

SEQ ID NO: 537160 - DNA, 957 bp, Stenotrophomonas maltophilia
atggatacactgtcggattgcgtaaatggtttgtggtctgatttgagggaggacgagcactttcctgctgtgcgtcccttgctcgcgcactacacttctctctctacaatggaatctattttccggggcgaagagatctggatgtcacacccattcttaatgaatgacgatgaagagcttaagtggggtattgttgagggcgtgaaaaggattcggaccaatgagcatctcgcaagaggttttggttcagcaagtaattacgctggatttctggaggcagtcgagagtgccaaggataaggaaggtgggaccaacgctcttgatacatacgtcgcttgcttctgccagcacgaaaagaatgacaaggacggccttctctcaatgtggcgagcatacggagccgatggtggtggtgtggcgattgtttttgatacaagcgcattagtcgaggacgaccaatcaccattgattatagctccggtgcgttacgccacaacagaagagcgttacgcgtggatagatcgtgccttaaatatatgctctaaagctgtagctgcctttggatccagtgcgaaccatgtaaatatcggccacatagcctatgcatattttcagaggttgcgatacttcgcactttttaccaagcatgtggcatttcgagaagagaacgagtggcgtgtggtttattttcctgatagagacgagaagcagcgttatgcggagttgttgagctatgcgattacgcaaaagggcattcagcctaagttgaagcttcgactcgggttgaacgcgattggcgggccattgctcctagaggacgcggtgagttcaatactcttgggtcccacagcaggaagtctgctttctgcacatgctcttaaacgaatgcttcgaaatctaggaaagcctgggcttgccgacaagattggtttctctagcactccctatcggccatga

SEQ ID NO: 537161 - DNA, 942 bp, Stenotrophomonas maltophilia
gtgggatctcttctcgttgatctcgaatatttcagagaggcgacgtgtgctgaaacctctcccaggatatttgaccgaatttctcgagtgctgactaaagccgttactgatggatttgcagtacacacaccaggcagcctatacgacatgctttgtggcgagatgcctttgtggagtgtccttttcgagcatcccgctgagttcggacttgacataggtgacgtttccgggctgttgactttgattgatcaatgcttggtgtacgacgccggtttagatctagaatattctgtgagaaatcagggtgctccgtcttcatctagtgcgtatggggaggcgtacagaacagattctcacttggcctgtggagttctggctgcacccagatactcaggtggaattatagagatagagtataggggctcggactccagaagctcattccttgtctgcgaagagcgtgatctgctgggtctttatagatttcacttggggaggaatatgggtggtgcaggggttttcacggagttttccgttattgcatttccggatttattatttgtgccttctgtcagtcctgctgacttgggtgttgacttgcatgagtcaggcggcaaggtcgttgcgcatctgtcatttttgaatgatgattatattgatgtgtgtgaagagtgcgcgtgggatcttccgcgagttcaggctgcggcgcgcgcaaggggtgtagacctcagcgatgagagttcgaatactaaggcggaccataggaagctgcgccagcggaacgtgtcagttgtaatggatgggcgtgctaggtcggtttcatgcacgctgcataccaagttgagtgggcaacgcggtcggatccactactcagtagagagagttggcgcggatgaacgccaagtggttgttggaatcatgcacgcacatctcccagtctag

SEQ ID NO: 537162 - DNA, 1089 bp, Stenotrophomonas maltophilia
atgatcagagatctgcgcattcaggggtttaaatgtttcagtgatttgagtttgcgacttgccccaatgactgcgttatgtggcccgaacgctgggggaaaaagtacaattcttcaggctattcttctacatcactgtggtatggcaaaatcaaacattcctgtaaatggcccttttggccttcagttcggggatgctgactctcttttcaatagagatttgcatggtgatttggagggtaagttcaccatcagtattcagccgggtgcggttgtcgaattctccagcagtacatctgcccgtgttctagacgtaaagtccactcgcacatccgagagccagaattcgatgatctacctctcggcggagagattcgggccgaggttggttcaaccagagttctcaagccaaggaatgggcgaattcgatgtcggattcgctggtcaatatacggctgaggtgctcggttcacatgagcgagatcgcatgagagaagaattgatccctggttctgattcggtgccgggacttcttctgcctctggttgagtactacatgagtcaaatttttggggcgattgaagtccaagtccgtgcgaatggaaatgcaccgccgtcaatgtatttcaagcgtccaggtgtgcaagaggactgggtcctctctacgcacactggatttggaataacgtatgcgttgcctgttgtcgttgcgggactaacggctgaggttggctcaactttcattatcgatagtcctgaagctcacttgcatccttctgcacaaacggcgatttcgaaatttctatcaatgcttgctgctactggtgtaaatgttctaattgagacgcatagtgattatattattgatggaatcaggattgcagttacatcaaaggaatcgaatggactgcgcaaagaagattgtcttcttatcgcgatcaattctggacgtgatggctccagttcgcttgcggagctaaccataggtgatgacggccgaccgtcggactggccgcgcgggttctttgatcaacacatcgcgaatatgcgatcgctccatatcaacacccgttcgtctcgtaaggagtga

SEQ ID NO: 537163 - DNA, 1131 bp, Stenotrophomonas maltophilia
atgattagtccgacgctcaacgatctggatgaccagaatcagttcgaacaggaggaggctgttgatgggggctcagacggtgctttggcgcgaccgtacgaccccactcagattcgcgtcgaacctaagatgttctcgctacgaaacatacttgacatgatcgatgaaggggagattgatcttgctcccgatttccagcgcctaaaagtttggtcgccgggacaaaaatcacgccttatcgaatctgttcttttgcggattccattgccggctttctactttgctgctgataatgaagggcggctgcaagttgtggatggagtgcagcgcctttcaactattcacgactttgttcgagggaataagagtttcgcgttagtggaccttgaatacctgtctgatgaagtgggcgggagaaggttcgatgatttgaggagtacgctttgggctaagcgcataaatggcacgcagattgttgttaacgtcattgatccgcagacaccaactgctgtcaagtttgacattttcaagcgaattaatactggtggcactcctctgaattcccaggagattcgccactgtatgagtaaggcaccatcgcgcgagcttctccgagagttgactgcaacgcaggagttcagtcacgccaccggaaatagcctcgcaactaatgttcgaatggcggacagggaggtaacacttcgagttcttgcattctccatgtttggtcttgataagtattatcagtgcgaggggctggatcagtttttgaacgatgcaactcaggttattgataacaatctgagtgcttcgcagattttacagtattcatatcatttcacgcgtgcgatgcgtgttgcttacgacatatttggcgagtatgcgttccgtaagtggccctacgagcataatcgaagaatgccgattaacagggcaatctttgaggcggtggggactactcttctaatgacgcctgaagatcggctgaggccgcactctcagataagagaggaatacagagcgctgtgctctgaggatcacgatttcatttcatctgtaactcagtctactgcctcggccggtagcgtggcactcaggttctacaaaattggaaaggtgtttgtggcatga

SEQ ID NO: 537164 - DNA, 852 bp, Stenotrophomonas maltophilia
atgggcgagcgcatcatccagcgccgcgcacaccgccgggaccggccgccccagggtgggccgacgcactggggtgaggtagtgccggccgctggccggcaatcccggtctcgcgtgggtgccggccagcggccggcactaccggtcaacgatgggcgatcgcatcatccagcgccgcggcacgccgccggaaccggccgccctaggggggggccgacgcattggggtgaggtagtgccggccgctggccggcaatccggtctcgcgtggttgccggccagcggccggcactaccggtcaacgatgggcgagcgcatcatccagcgccgcgcacaccgccgggaccggccgccccagggtgggccgacgcactggggtgaggtagtgccggccgctggccggcaatcccggtctcgcgtgggtgccggccagcggccggcactaccggtcaacgatgggcgatcgcatcatccagcgccgcggcacgccgccggaaccggccgccctaggggggggccgacgcattggggtgaggtagtgccggccgctggccggcaatccggtctcgcgtggttgccggccagcggccggcactaccggtcaacgatgggcgagcgcatcatccagcgccgcggcacgccgccggaaccggccgccccagggtgggccgacgcattggggggaggtagtgccggccgctggccggcaatcctggtcaacgatgggcgagcgcgtaacccagcgccgcggcacaccgccggaaccgaccgccccagggtgggccgaggcatcggggtgaggtcgtgccggccgctggccggcaatcccggtcaacgatgggcgagcgcgtaa

SEQ ID NO: 537165 - DNA, 330 bp, Stenotrophomonas maltophilia
atggccgcgaccctcgaagtcgaatccacactcaccgatcgctaccagaccacggtgccggaaacagtgcgtcgtgccctcaagctgggcaagcgcgacaagatccactacaccattcgccccagcggagaggtggtgctgacgcgcgtcgaagcatcggacggtgacgacccggtgctcggtcagttcctcggcttcctagccgccgatatcactcgccatcccgagcggctgcaagctgtggatgccggcctcgtccaacgcctccaggtgctggtcggcggcgtcgatgtcgatctcgatgccgccctgtcggaagacgatgaatga

SEQ ID NO: 537166 - DNA, 213 bp, Stenotrophomonas maltophilia
atggacgtcgttcacctcaatcaaaagcaactggccacacgctggtgcataagcgaggccaccctggaacgctggcgcagcgagggggtgggccccaagttcctgaagctctgtggtcgggtgctctaccggcaggtcgacatcgaagcctacgaggagtcgtgcctggcgacgtcaaccaagaccgtgacggcccaagtcagtgctggctga

SEQ ID NO: 537167 - DNA, 1404 bp, Stenotrophomonas maltophilia
atgtcgcatgactcacccagcagcacaccgcgagacggcagcccgcagctcaggggcaaaaggcctgacttgatcgaactgatcgccgctacccttcattcagtaaaggcgtatgacttgccggcggaatgcgagcggctcggcttggcgaccgggacgagtagcgaagcgcactccagcaagcgcgtgtacgtgcgaagccgtctccaaggattgagcaacgatcagcttctccagctcgcacgccaggttgaacaggatcacgtcagtttttcgctgagcgaatttctcagactgttggatgagtcgagcgacggtcagacagtcactgaacttacgcggcgctcgatcctcaagctgctgaacgacgtggatctcttcggggagctcccgcttgtcgagcagttgtccaagatctggccattacccgaaatgcgtggcgcgggcttcgaggcaaatttggaggagtccgtcatacggcactgcgtgaacaacgacgactggaccaacgctgaattgctcgaggtggtgggcgcactgagctgctcccgacaactgttcttcaagttggttgaggcggtcgtctctccgaatgcccgaagaggaaaggagcagacgcagctcgttgagaagctgaatactctcctcaaggcggacggcttccagctaaggccatcggggagcatctcaggacattcggcgttcgcggtgaatcgaatcactggtggcgtatctggcgcacccaagaatttgattttcgcgtcaacgggtccgaagcccgagatcgtcatccaggatgccatcaataacgacatccgaatcgttaggaatgaagagcactgcctcgtttacgaccgcccgattcaggccaacggacttaccaaggaggagatgctctcttggtggaaggaacggcaaggcatccaggacgaatcggatgcgcggcgatcgctttctcaacgtctgatggcatcccttgcatcggacggcgagcgaaacgtattcagcgtctactaccgggcattcaaggatctcggcgataagctgccagccctcgttccgcaggtctatctgcattacgacccatacacgctggcacagctcggtggggctgggcgcttgtctcggcaacgcatggacttcctgctcctctttagtgacgcaggccgtgtggtcgtcgaggttgacggatctcagcacttcgccgaagacgggaagccatccctcgcaaggtacgcggacatggtggcggccgatcgtgacctccggctcgccgggtacgaggtctatcgtttcggggccaacgagctcaccggccacgggtcggcggaacggatcgaagcattcttccggcgcttacttcggaagcacgcggtccttcccggagccggttcggctgagtga

SEQ ID NO: 537168 - DNA, 510 bp, Stenotrophomonas maltophilia
atgagcggaaatcgatgggaccagccgggcgtgccccacaaaggatggcactgcgtggacgtggtcgacctgcgggccgacggcgagtcggcggacgaaaccgattacgcgacctgccagatgtgcggcaacgagaagatccgctacgtccacatcatggagcatccggatctggacgagaacttcgacgtcgggtgcgtctgcgccgagaagatgagcggcgactacgaggggccgaaacggcgtgagaccaagttgcgcaaccgagcagcacgccggacccgatggctgcagcgcaagtggcgggtgtccgccaaggggaacagcttcttgaacgtcgatgggcacaacctcggcgtccacatgaataagttcaagcggtggggctaccggatcggcagccggttcagcgccaagacctacgcaactaaagacgaagccaagctggcgctgttcgatgacttctgggccgcgacccaggatgacgatcggctgtgggccagtgactga

SEQ ID NO: 537169 - DNA, 1173 bp, Stenotrophomonas maltophilia
gtgtctgacaagaacaataaaaccctgaagcccggctggcgtcgggtgaaattcggcgaggtggtgcgcctctcgaaagcgcgcagccaagatccgctggccgacggcattgaacgctacgtcggcctggaacatctcgaacccggtgacttgcgcatccgcaattggggcaacgtcgctgacggcgtgaccttcaccagcgtgtttcaacctggccaggtgctgttcggcaagcgccgcgcataccagcgcaaggtggctgtggcggacttctccggcgtctgctctggcgatatctacgtgctggagaccaaggatgcgcaggtcttgctgccggagttgctgcccttcatttgccagaccgacgcctttttcgatcacgccgtgggtacatcggcgggatcgttaagtccccgcacgaactggacaagtttggcggactttgagcttccccttgctcctataaacgaacagaaacggcttgttgatctgcttcgagcagtcgagcgaaccagtgagttgcatcaggaggttggcggatttgccgaccagcttgttcgcgcattacttgctgacgtactgagtcgagaatggccagttgtcgaccttggctcagtcgttcaggggacccagtatggcctctcaatcaacgccggatcggacggtcagtatccgatgctgcgcatgatgaatatcgaagatggcctctgcgtcgaaaatgacattaagtatgtagacctcagcgagaaagacttcgaaacctatcggctggtcgacggcgatgtgcttttcaaccggacaaacagctatgagctggttggccgaacaggggtgtacgaactcaagggcgatcacgtctttgcttcgtaccttgtgcggctcaagactgtccctgacaagctggaacctaagttcctcacgctttacctgaattctgattttgggcgccgacaggtacttgcttatgcgactaaagccgtgagccaggcaaacgtgaacgccagcaatttactccgggtccgtctgccgctgccgccactggatgtgcaacaacagttgctggatgagatagcgaaagcaaagtgtgcgggaaaggcagcgatggaacggcgtacttcttcagaggtgatgaagaagcagttgttcgcggagatcacgggggacgcaaggtga

SEQ ID NO: 537170 - DNA, 1014 bp, Stenotrophomonas maltophilia
atggacagaatcgagatcgacacttgggcagatatcagtgcggaaggttggagttccctccttcttggcaacggcgcgagcattgccatccacaaggagttcgcatacccaacactccatggcatcgctgatgcaaaaggactgctcgccaccactgccccaatattcgccaagctcgggacaaccgatttcgagcatgttctgctcgcgtgctggtatgccgagcacgtcaacggggcattggggacgccgtcggccgccatctccgcagcctatgaggaggtccgtacagcactgatcgaagctgtgcacagtgtgcatccggtgcatgccgatgttgccgccgacctgcaactggtcggtgcgtttgcgagcgcgtttcccactgtcgtcagcctgaactacgacctcaccttgtactgggccatgctgctgttcaacgcggcgaacgggagttggttcaaggacgcattccacgacggggagttccagacggattgggagtatctgcggcgaccctatgggcacgctgcaggagcaacattggttttctaccctcacggcagtcttgcggttgcgcgtgactaccttggtgatgagacaaagctcgctgtaggcgcgggagccgcaggtgacttgcttggcaccataacccggaggtgggcgtccgggcactatgtgcccgtgtttgtaagcgagggaaccagcaagcagaaagtcgccgcaattcgtcggagccactacctgacgaacgtgtacgaagaggttttgcccagcctcggagagcgtttggtcgtgtatggctggagctttgacgaaagggatcagcacgtgctcgatgccatatcggtaaatccgccgaagcgaatggctgtctcggtgttcacggggcaaccagacggagatcagcaggcgttctgccatcaggtactcaaggccattggccggtccttgcctggcacagaggtcacgttcttcgattcgcggagcccgggttgctggaacaatccatga

SEQ ID NO: 537171 - DNA, 501 bp, Stenotrophomonas maltophilia
gtgagtgtgattccatggccgtaccggctgctggccctcgcggtgctcggcgtcgccctggtcggcttcggctggatcaagggcgcaagccacgttcaagcgcaatgggatgccgccgtccagcaacaagccctacagaccgcagccatccgcgagcggcaggcgcaagccaccgtcaaggtcgtcacccagtacgtcgaccgcgtccgcatcgttcgcgagaagggcgaaaccatcatcaaggaggttcctgtctatgtgcccgttcaagccgatgctgcttgcactatcaaccgtggctttgtgcgcctgcacgacgctgccgccgccggtaaactgcccgagcccgcccgagatgctgatgcggccgccacaggcattgcgctctctgccgtcgccggaaccgttgctgccaactaccagacctgtcacgagaacgccgagcagctaagggcgttgcaaacgtgggtcagggagatgaaggttgccagcgagcagtag

SEQ ID NO: 537172 - DNA, 228 bp, Stenotrophomonas maltophilia
atgactgccaagccgaagatctgcctgctagacgactggcggcgcgtgttgcgacgtgcctggagcatccgcttctcgctgctggccgctgccttcacggcagcggaagtggtggtgccgctgttcggggacgtgctgcctcgcggcgcgttcgtgctgctggcctttgccgccagcatcggcgcgaccgttgcgcgcatcgtggcgcagccggagatgcaccaatga

SEQ ID NO: 537173 - DNA, 1575 bp, Stenotrophomonas maltophilia
atgacggatcgcgtcgtcgttcaagacctcgcggaggtttcgagcaagccgacgccgggaagcgaactgcccgccttccagggtgaagtgctctcgcgcgccaccttcggggcgagcgcagccagcttcacgccggaaacagctgtcgctccgctgccgcccagtctggcggcaaggctgctggcggaatccttggcaggcccctggccacccatcgatgcgccgttctttctggtcgaagtgttgcgccgtgatacggcctcaagcgccatcgtcgccaccggtatggatgcctttggcgaccagccttggccggatgcgcaacgcggcgtgtttgccttccgccatgattggatggaacccctcgtggaacggctggagtggcagaccagcgtcacgcggctggccagtggcaacgaatcccgtcaggcacgccgacgtgttcctcggcgctggctcacctacaaggtgggcaacgcccggcagaccgatgcactggtggccgactggctggccgatcatcttggtcaaatggcgctgtggccgctgccgcagtatgccggtcacctcacacaatcagctaagtgtggagcactggcgcttgaggtgtcggatgcggactggcggcgctttggcccaccggctgccgcgctgcgtctgacctatgacggcgtgcagggctgggacagcgacgaacgctgggtgctgatcattgcgcccgagggctggcaagtcgcccaactcagcgacgtggaaaccgatctgctgtggctggccgaacccttggcgcgtgctgccggagccggtagcagcgtgatgcccttggtgtggggacgcgctgtcgatccggcggacttgacccagtgggtgccggggatggtcggcggcagcgtcaccacgactgtcacgcccgcgcaaacgccggagttggacgtgctcgacgacccgtggctcgacgagattccggtctggcccgatggcaactggcgtgacgatccgacgaccgtcgcgcaagccacggtcacgcgccaagacttctcgcctgcagatccgtgggggcgccgggacgatccctgggcgacgacaactttgcaacggcgctatctggccagctcactcgatgaaatcgagatctggcgtgcgcggttgtggcaaacccaaggccgtctggaagccttctggctgcccgatggcttggccccgatcctgtgggtgaacgtcgaagccgatcccgaagatggcttcctgcgcgtggatggcaaagacatctccgcgcgaatttcggatttttggcatcgccccgccgcctgcttgatcgtgcatccagacggctatcggcagtacgtcctgacggcgacctgccatctggatcaaggcggtgtgctggtgctgcgctcgggtctcgacgactgggtgcccgcgggcagccgcgtcattcgcctcgtgcgctgccgcctcgaccacgatgccatcgatctgtactggcacagcccgacgctgctggagatcaccttgaccgcgcgccagttgcccgaaccgcgcggcaatgaccgtcaaacctacgagggagagtaa

SEQ ID NO: 537174 - DNA, 1095 bp, Stenotrophomonas maltophilia
atgacaatcaaagaactcgcgtactccgcgcagcagcaccttcaggccagcactggtggctcattcaagcgagcccacgtctacgagctgttggcagcttccttcggcttcaactcgcacgccgcgtttggcgttgacaccgtactcacggaacttcgccagaacgatctgcgggtggtcccgcaaagcgcgctcatcaagcggcgttgcatcgaacttgggtatcaacctgacaccgcgactctggcgtcgtcggcgctggaatctttcctggcagagcgccagatcggcattgccagcatcccgtcattggtcagtcgcttgagaggggagtcgtccagcgaagacgaagagttcgaatacgacgaggatgagctattcgaccctagcgacgaggcgttcggcccgatccttctagatggattggctgcggcggctagtaagggcaatgccctggctcactacgcgctggcgctgatacacgcccctgacgatgaagacgacccggacgctggaagttcctattggtactcccaggggcagcagggccgtgtcctgacgggggtggaaaaggagtgggccgaagcccacgaggctcgtctcgctcaagccgagaagtactcgcggcaccttagggaggccagtcgactggggaatcaggatgcacttctcgacttggcggatcgatttgacgatccgtccttcttcgagcagccgcgccacggcgtcgatgctgacccagcagcgattgcggcgatcgcagaacgcatgggccgcacttcagacgccaagcattggctgacgctggctgccgagaggggagatacggacgccatgctccagctcattgaggaacacgatcaaggtgacctacagcgatgctggacgtgggtgtatctctcgcagttggtcggaacggatctgactcgggacgcgcactacgccatcaacgaggacggttcggactatgacgatgacgtcggcggtccagcctacgtcgcaggtcgtgacggggtagatcttgaaccgcttgctccggcgcaagacgccgctgccaggctcgctgcgcagacactgtttgaacagatcgaatag

SEQ ID NO: 537175 - DNA, 213 bp, Stenotrophomonas maltophilia
atggactacctcttccccgtcatcgatgatgctgattgcgccaagtgcggccgcaccgtttctatctcggtagttggggatccctacaatctcaacgcgccaaagctggattcagcttgccgtgatccgaactgtccggtcaacgaagagaaccaacctaacaacattcagatcgtgacaatttgcttcgctgacgaggacaatcaggaatag

SEQ ID NO: 537176 - DNA, 774 bp, Stenotrophomonas maltophilia
atgcacgtagttctaatgctaaccgtggtgggatcgctgctttggggattggtcgctctgaccccatacctgcttcaaaagggatggccgcttgcactagctgtgcccttcataggcctcatcgacgtcttctggggcgtatcgatgatctacgtcattgatctcctcaattcacattatcgaaggaataatgagtttctaagaaagttctatgcggagctccattctgacctcctatccatgctggcgctagctgtggtcctgtttgtgatcttctctcttgccaggaccagctactcgctgtcgagcatcgacgtcgcgtgcttgggtctcccgatgttcatctgtgcactagattcactggcacggaccaaggatccgtctggcatattaaagatgagcctccctcgaaggctagttctgatggcgtttcccgctggactactcgtcgcatcctgctgggtgctgatcgagattctatctaacgaattctctgctcctgcgtccctctggcttcagctttgcattctcttcgccggcttcgcgtcctacgtgggatccaagcagacgcgatactttatgctgcaccgtcgccttggaatatccccgacgatcatggcccttctcaaaaaagtacggggcagaggagcaccggcgttctacgagcagaccgcccagatggcagagaagttccagcgggatatcaacgtagctaccgctaaggcggctgcggataagcgaaggttggcaagagcctcacggaagaagcgatag

SEQ ID NO: 537177 - DNA, 2436 bp, Stenotrophomonas maltophilia
atgaaggacctgagtgaatccgcagaaagggtgctcaacgctgtcgaaagcgagagccgtggacgatttagggcgcttgcagactccggtcagattatcggcgcgtacgatgacgcagcctggacctataggggatcatcaatactgttctgtgaggtaggcgacaagcgcgctggctcgaccaggcagcctgaacttgatccgctttcaggaagaatcgcacgggcgatggtagttgatcagatctcgtcagggcgcagaccgtccgctacattggtcaggggtagggctatgacgttcaggctcttggcatcgattgtcaatgaagagatggtttcttggtgtggactaacgcggactacgcttatacggctcattgcaagaatcaagaccgacccaggcatgagcgaagcaacggcctacaaccgagcgggctcgctacaagcaatcgttgactacttgaacaggctacatgttcggatagacgggaaagaggtccgtttccttcggaaagtcatcatctggaagcacaaggtcgagaatccaattagaaaaattgaggatccggagtcggcggaattcagcaggcactcccgatcaaagcacagaccagacatcgccatcgccttggctcgcgctcgaaacgcggtcatctccacccctgagatcgagcctactccaggatacgaccgcatcaggttagaggctcttgctccagcactagctgtaggtgcacgtataggagaatgcatatcgcttccggtacgctgcatcgacagaagactcggcccgggctacacgcttcttcggcagcctgtagagaagtcaaacgacgcaacgtctgtcccagttccagaggtgtgggagaaaccgctggtggaagccgttggctacttggtggaagcgtgcgcggaagccagagccagggcgcgtctcattgaggaggaagggttcacattccttcgcgataagctggatacgctacgtaacgcgcagggtctatcgcgctcacgactcgcgcaaatagaactctccggctgcgaagatgtctacttcatcgacgaaattagcgcctgctttgatgtgagccaaaagttattcaatgctgatggtcgatacaaagaatgcctagtagcgctcccaatgtcgactgtatcagtggtcgtccagtggctggatgatcgtttctcttcttgggactgggctctatttacccacaaggtgaagggcgacatacccaacggcctttctgtcgatgggctggttagaggaagcggcgtggaccgggcgtccgttcaaaagatgaaatggttcatcgccgatctgcgtgttcttctgcgcgatatgagcgtagaaggcgcgttcaatgcggcaacgtcagaagttctcgtcgcgcgctttcgcctgcgatggatgaaggttcggcaggcagcgcttgctaaacgaggaggcgcacacggaacaggggtcgtgctcagcaggcttgagatagctcttcgggagaggtacgcgaagcttctttctcagcacttttctgagaacatctcggctcacggaaatcaccctggcagagagttcatcgcatcgtctcctcctgctggcgtgcctcggaggctgagtgaccaccttatcgtggtatgggacacgcaaacatcactgagacatagagagggtttcctgccatctccgctgcgcaggccagacatctacaggtaccttagcgacagttcgattcagaagagcatctttcggagggcgaacattcgcgatgatgatggaatgattgtcgccttcagtcctcatatgattcgacattgggtgaccgatgcgatgctgcgggccggcacgaatgagctcgtggtcgatgcttggatgaatcgagcgccgcggcaaggcaggcagtacgaccatcgaaccgcgaaggaacgcgcagaacaacgtcggtggatgtaccttgagaagggatccgagcctaacgacttcctgggcaggagagtaagggagctccgctcatcaaacgttagcgaggaagatatccaatccatcatcgacagcaaactgtcgatcctgcacgtgacaccctacggcacctgttcacgcgaactgtacacctcaccttgtgataagacgctcgtgtgcattcgaggctttggaacgagcgacgcctgtagatcattccaggtcgatgtaaccgatcaagacgcgcgacggaacatcgaacagctgcgatctagccatcagcggatgttgggagtattgatgccgaactatcatgcgataggagagcgtctcgaagctgagcttgatcacagcgagccactggatcagcacatcgaattcctcttggacgtcgtgcgctcatgtgatcagatattacagagctaccgtgatacgcgggcgccagatagcaaaaatattgatatcaaggtcgtatag

SEQ ID NO: 537178 - DNA, 1644 bp, Stenotrophomonas maltophilia
atgaagcgcgcactcccaccagcgcagttgcgcctagtcgccgcgaaggccctgggcgaagaagttgatgaatttgaccatcggatcgcgtccccgagcgggcaaagcattgaggtcgttacgccagaggggcaatggccgacaacgctgttcatcgaactgattggcactggcacgaagaaagttccatgggctggacagattcacagtaatccgctacttgagtggatcgtcagaagctggctgattgatcgactccagacggtcctgcacgtcagaccgatccagttgctcctacgtaggatctccgacgtgcaagtatcggcgattgacgcggtgtcaattgagagggcgctgtctgcatggattgaagatatggcgacagcgtgtgtagctgagaatcgggacgacgtccccatggccggcgtcctgctctaccagtgggcgctagaggttcaagccgtgcccggattcagcgactggaccttgtataggcttcaggcgctggcttggagagggagagggaagagttatggacagctaactacactccgagaccccgttggtggtccgtacacccgccctgaattggcgagaatcgaaaccgcaatcagctcctctggcgccgtcagcactcgacagcgcgccgcgttctacctgtgtcgggactggggacctaggccagtacagttggccctcatgcgtgccagtgactttggcgaggatagcttcggtccctatgtcgatataccgagtgtgaaggcccagcgtgccaaactgcgccgtgcagatgggaacatagttagacgacacataacagaccaagcagcagaagctgttcataggcagatgcttgaggctgaatcacaggtgtccatgctccgcgaaaagatgcaggggtgcctcagcgagctcggaatagagcgatgccctgcaccattgccattgttcccgcgccgcgaaaggccggagcccgcgctgatgagattctgcgaagattcggcgctctatccatacacgctacatgcgaccggcgggatgataggccgggagattgcagacatcggtaaggctttggcgcttgtacaggatgaggcaatagcaaatctaaccggagattcattcgccacgattctcgcgtatcggctaaggcgaaccaagggtacagcgatggtcctcatgggctgttcgcgtgaggaggtcgccgaagccctcgaccatgcaacgccttggtccgtggaacattactttcggtacagcaccgaaacgcacgatctaatcagcgcagcggcagcgtcaagccaacagatcgcccaagcggccaacatgtgggaaggtcgatttcttcaagatgccgtccccgaaacaggtgaacgacctgtcggcgggctggggcgttgcacgctcaagactccttgtccgaaacaccctcgtatcagctgctatgcgtgccatcgattccgtccagacaggaatgcggaccactcagcagcactcaaagagattgtggcgtacgacgaactgatgcggcagcagagtaccgggcctgtacgtaatcagctctctctagaagtcttgggagccatgagcttagtgcagcatctttgccgcgatgacggaggcgggaatgaaggacctgagtga

SEQ ID NO: 537179 - DNA, 1299 bp, Stenotrophomonas maltophilia
atgcgcgtgaaaagtttcatccgaaacgtaccagcaggctcacgatctagcgacgggaaaaacgagttgctagggttcaccgcaatttcggtccaggcaactcaagtgggaatgcagctttgccctcagcggaatgaagttccaacgcttctgctcataaagcagaggacgggcatccgtccatacctactccaatgcggacttccggcggtactagcaaatctatggatcggatcgctcagtgagaaggacaacactagggatgcgttcgcgcgcgatgcccgcatcctctaccactacttctccagcgtggcggtggatcttgagtctcgcctaatcaatctaagatcaatcactaagaacgaagtgatcggggctgttgagcttctctgcgtgaggaacgggaggagcttagcgagagctacttgcacacggcggttggatgccatccggtcacttctgcgctcggttcaagaccatcttctgtctacacaggatctaaccaaggatgagcttcatggtgtcagcgtgtatttcagcgcaatggagagaagatttgcgagcgcgtttaagaagcacataaaccgtggcgccagctcaatccactcaagggtcctgtccgaagcagagatcgagctgatccatctcatcatgcatccggagtccgagctcaacccattccgaagttacgccgtaaggttacgcaactattgcatcttgagggtcgcgtgtgacgccgccccgcggcgatcagaactcgtattactggaaacgacggacttggacctatccggaagtccgacgatctccattaagcgtccgacacccagggtcatcggacagcgccgcgacaggtcggccctaaagacgcaaaccaagacccttccgttgagttcagaattggccagtcttttggcaacctacctggaaagctgccggccggaactagtcggcaaggggagagtgagtactgcgctattcccgagcgccgccgacggaaagcgcctgtctggatcctcaatcaaccggctgttctccaaagtctctgaagtgatcggagcggaggcagcacttcgtttgcacccgcacggacttcgtgccacctccaccacgatgcaacggaagcatctgcagtcgatagcggcaatttctgactctgaccttctgctagccctctcatatcacggaggttgggcgccagacagccggtctgttcagctctatacgcgacttgccattcaagagaaggtggagcggcttcttggttttcgctcggaaactgcgggaggtgcgaaatga

SEQ ID NO: 537180 - DNA, 1983 bp, Stenotrophomonas maltophilia
atgcgtatcgagtccgtccggatttcggggtttcgttgtttcggggcgacaccgaccaaggtttccttggcctccagtgtcactgccatcattggtccgaatgccgccgggaagacggcagtgttgcaagcgctgaccaagctgtttggcgtgtctcgcgcgcagcgcacgattcatcgatccgatttccatgtgggaccgagagacaatccggatgaccgtgactccaaggcgctcttcatcgaagtagtcattggcttccctgagctcaaggcgggggaagcgaccgccgaggcaattgcgccgtcctttcggcgaatgcagatcagcgaatcgggtgaggcgccggtctgtcgcatgcgtctggaggcgacttggcaggacgatggcaccgtcgatggcgaggtttcccaagagctgtattggatggagaccctggacgacgatccactcgaccccgtattgaccccagtccttgcatcggaacgcgcgctcatccagctctactacacccccgcgagtagggatcccattgcacaggtcaaggcgtcggccggcgcactggcggctcgcctgctacgagcgatcgagtggaccgaggcaaccacgggtgccgtggagcgggcgacgacagaacttgccgccgtgttcggtggcgaaccggcgattcacgccatcagtcaggctcttggtgagcgttggggcactcttcacgacgaggtggttgacacatgcccccggctgagcctggttagtactcgctttgaggaggtcgtcaacaagattgccgtggtctttgcggaaggccccgatggtcacgagcgtggtctcgaggccctcagcgatggacagaaatcgctgttctactttgcgctggtcgcggccgtgttcgatctagagcgtcaagtggcgcgcggcactttggctggattttccgacgacaggctgcgggtgcccgcgctgagtctgttcgcgatcgaagaaccggaaaaccatctgtccccgttctttctgactcggatcatcgagcaggcgcgttccttgactgagagtggcgctagtcaggcgctgatcaccagtcattcgccagccgtgctgagccgcgtggaacctaaggaggtcaggtactgccgtcaggatccgaaaaagaggacctcgacagttagaagaatcaaactgccggcagcagcggacgaggctgcgaagttcgtgcgtggcgcactcttggcctaccctgagctgtacttcgcgcgctttgttgtgcttgttgagggcgactcagagcggatcgttctaccggcgcttgcaagatcgctggaacttgcgatcgaccccgcgttcgttgccattgtgccgctgggcggtcgccatgttcagcatttctggcgactactgaagcagctgaagattccctacgccacgctgctggatctggaccttggtcgggtgggaggcggctttggtcgagtgaagaccgccattgagtacctgatcgagatgggggaatcgagggacgaactgctcaagcttaagaacggtgttctttctgatgaaaagttcgcggagatgcatacatggcagactccggaaaaggtgaaaattctctccagctgggccctaatgctcaggaactacggtgtgtttttctctgctccgctggaccttgatttggcaatgctgaaggcgtttcccgaggcctacgaggcaattgttcctccaggaggcggaccgaagctcaaaatcgaaaaagctgctgaagtagttcttggtacttcgggccccgggatgatgctctatgtggaagagctcgagccgtatccaaaacttttccccctctatcgctaccatttccttactcatagcaagccggttactcacctcgaggcgctgacgcagattgggtcggccgacttggcggagaatatgccgcgggtgctgaagaagctgttgacgtacatccagtctgcgctgcgaggcaactaa

SEQ ID NO: 537181 - DNA, 1902 bp, Stenotrophomonas maltophilia
atggtcgcgtcgtctaggcggatgaagcccgaacagtggatgcccgtgggggtggcggcattagaggagagcgctttggaggtcgttcgctcggcggggcatcgctcggtgattgccggacccggcgcgggcaagactgagctgttggcgcagcgcgctgcgttcctgctgcagacaggagcatcgcgatccccgcggcgaattctagcgatcagcttcaagcgtgacgcagccgcgaatctgatggcacgagttcgggcgcgctgccatccccgtcaagcagatcgtctggattcgatgacgttctcggcgttcgctaaaagcttgctggatcgatttggccaggggctgccgcaagcatggcggccaacgccggactatcagattctgatccctcgcaagggattctacgcagatttcctgagcgatcttcggaaagtgccacctgaggtcggtacagtcgaagacatcagcgccatcttgcacaagtcatttgaaagggactttgtgctggccaatccgcttcaagaggaaggtttcgatgcgcctacgccaggacagtgggcagctgaatgcttctggttgacagcgcttcatgtatataagccgagccaactcaccttcgagatgttgacgcgcttggcggagcttctcgtacgggtgaacccgcagattcgtagcgctctacaggttacgtattcccatgtgttcttggacgagtttcaagacacgacgagggaacagtatgacctggtgcgtgccatcttcctcggttcggaaagtgagatcaccgcagtcggggacaataagcagcagatcatgcgatgggccggagctatgcgtgatccctttgctgcctttgagcaagattttggcgcgcagcgagttccgttgtcgaacaactatcgttcttcttctaatctggtacagatgcaggccgtactcgctcgggcgcttgacccgcgggccgtgacgcctgttccgatggcgtcgttggtgcgaacggctgggacgtgtgaattgtggaatttcacaaaagccgaagaggaggctcaaggcctggctgatttcgtttcgcgtgtgactcgtgatgaggctctcgatcccgacgaggtggtgattcttgtccgtcagctccctcagaattactttgccgaactagagcctgctttcggaagcagtggtctacgtttgttcaatgcggcgggaaagattggtgagattgtcctgcaggatctgctcgtcgaggatgcctctcggtggatcatcgatgtacttcgcttggcgatggtcacagatgctaggcagtattggatatcgagtcagatagcgctgcgccggctatgggggggctcgagtgaagatgagcgcgtgcagaccctgcttgcccgagatctggatgcctttgtgactcaactcaggtgtcggtacgccggtcctccagcgtcgatggatactgttgcgtcgttgattggcgagattgctgacttcttggggcgcgaacgtatggctgcagcgattccctcctacgaacagggggactggttggaacaagtgctgaggtgcattgctacccatctccaccggtgctccgaaggaagccagggctggaaggatgccttggatgcgtacgagggagttggcgcaaccccgttgatgaccatccacaagagcaaaggcctcgagtaccacacggtgatctttgtcggtcttgatgaccaggcatggtggaacttctcgaaggacgagcacgaggcaaaggcgagtctctttgtcgcattcacgcgcgcgaagcagcggatcatcttcacctactgtcgtgagcgaggggcgcgtgctgacatcgctgcactctatgagctcctgcaggaggcaggtgtacccagtagaaacatgacatag

SEQ ID NO: 537182 - DNA, 945 bp, Stenotrophomonas maltophilia
atggcaaatggctcggcgaactacaccgaagaactggtcatggcattggtcaccacgcagcttacgatcatgagctttccaatcttcaatgtgcagatcgtgccgttctcgtcaaacttcgaaaatctgttcggggcggacgcaaagattccagggtcggcgaagatcgcgccattctacatgcagttcaaacgccccaatcgctcgaagccgggtggagatatttcgagtgaccgagccgctttggggcttcactgcacaacgggcagtctgaacttcgggctcagggagaaggcaaaacgcaagggttctgccaaggttcctgttcataagctgcagcacaatgtcctatatcgaatgcgcgcgcggctgctgaagcgggggatcggagacgctgcctatgtgtgttctctgtttctgagctccaaggaatatgtggcccacacgcacctgcatggcttactggggtggccattctactggttcaatgggccatattcgaatcgagctgtagtgattcacggcaccgcaactccctcattttccgccatcccctggcttgaaggacacgtgagcattccgccgcacgacactgttgcctccgccagccattcgtacagcttcgatccgactggtggcgaagtgtgttttcactcgccgcgcttactggacggagagagacgaacccttcctgcttggattgcgaacttggcggaatcgatccagttcgaccgcgcgcctgccatcggccgatctgatgaactactggcggagttgcgtgacatcgtcgggctgagagcggaaccgagcggtgatcgcgaccgcgagggtctggaggagcaaccagagagggacctcgattacatagcggagtggatggcattcggagatcagctcgaggaacacttcggcatctcccagtttgcgttcattctggaggcgtag

SEQ ID NO: 537183 - DNA, 1374 bp, Stenotrophomonas maltophilia
gtgcatccgatcattctggcgcgcttcgacgcattggccgcgtactgccgtctggggccggccatggggtcgattgaggaacattcatggtacgaatctgaggatggccgactgctaggtctggtgcttcgcgacctcaccgatggcgactaccaggctgttttcctagcccgcgaccatgccgagcgtttccgctggatccacggaacggagttcttcgacacgccggagggcgcgatcactgcactgtatgagcaggctccagagttgctggtccggctggagggcgagcgctgccaaggtgatgagcccgctctggccgtggacttctttaccctacaggtaccaccgaatcgcctgcatccacacttcgccatccttcgcagtggcgaaggctacagcccagcgcgagagctcatcatggccatgatgcgctggcacgatgacagcgacggaaattacgttgagcagtttcagtccaccgcattcgatgcccgcttgctggagctgtacgtgttcgcgatgctagttgagaacggcttcatcgtgagacgtcaaggcgccgctcccgactttctcgccaatgatggacatggcgagctcgcaatcgaggtcacgactgtgaatcccacggtcgaacgcggccaagtcgtgccttacccggaccccgtgacgttcgaagagaagacggcgtacctcaagcagtacatcccgatcaagtttggaagcgctttgttctctaagttgcgccgcaggtactgggagctgccacacgtcgccggcaagccgctgctgttcgcgatccaggacttccatgcgccgcaatcgatgatacgtgcacgaacgggcttagggatctatctgtacgcctacgactatgaatggagccacgacgtggaaggccggttggttattgagccgcggcgggtcaccgagcatcgctggagcaacaaggtcatcccttccggcttcttcgatcaagaaggcgccgagcacgtcagcgcggtactgttcaataacagcgctaccctaactaagttcaacagaatgggcttcgtcgccagcttcgggtcgcgccgcgtccgaatggtacgtacgggaacggccctaaatttagatccgaacgcggccgaaccgcttcgcttcacaacagccgtggacgaggattaccaagagagctggtccgaagggctggatatcttccataaccctcgtgccttgcacccccttgacccgcgccacttcccgacggcgatgcaccaccatctccaggccgatggtcaggtcctttctcgtaaattagtcgagggattccatccactcgggtcgatgacgagcatcgtggtaccgatgaacgacgacgcggtaggctga

SEQ ID NO: 537184 - DNA, 1047 bp, Stenotrophomonas maltophilia
atgagccagcttcagccccctcctcggtaccgccacaacccaattcatagcgtcgctgcactgtctcgtgtactgggctactcggtagaaacactaaagcatgtggccggaaccagtagctctcgctatcggcttgccaagcctattttgaaggaagatgggagctttcgccgtccatttgacgcactctacccactaaaagatattcagatccgaatcaaacaacgaatactgacggcggtgatttttcccgcatacctcaccgggagccttaagggccaagatcaggttcgcaatgcgaagctccatcagggtgcgtccatcaccgtctgtgaagacattaaatcgttcttcccaagtacaacttccgaagtcatctttgacatctggcgagggttctttggcttctctgaagatgtgtcgaacctacttacgctgctaacgaccaaagacgacttgttgcctcagggggctgtaaccagctctcacttagcaaatctggttttctggcgccgagaacacgctctctacttggggctcgcgtctcagggggtccgctattcccgctacgttgacgacatcacgctctcttcgcgacttccggtgactcacgatgacttggcacgccatatatcacttgtctatggaatgatcaggagcaccggccatcgtgctcaccgtggcaagcaggagatacagagggctcatagaggcatgcgagccaccaagttgctcgtaaatcgtcgcgcggcgctcggcactgccgagcgccaagccacccgcgcagctgtattcgcactggagaggagttttgctgtgacgggaggggttctctgccctgctttgattaaagagctcaactcagtgtctggtcgggtcagtcgacttgctcgactccacgccaatgaagggcaagcgctacgagcgcggctcacgaagcttcgtaatgaggttgggaaatctcatcgagtgcggaacgatttcagccaagtcgaagtcattggggttgaaccagccccccctgagaccggggaagggatgcaatga

SEQ ID NO: 537185 - DNA, 321 bp, Stenotrophomonas maltophilia
atgaacattggaaacgcgatacaaatgtgtcgcattcggcgccagctcagccaggcagaactcgccaagctagctggctgttcggtttcgtacctctccatgctagagaattccaagcgcgacccaacgctttcgacgattgaaaatatcgcctccggccttggagtgccagtcgagattcttttcttcctgggtgcggataagggagagctgaccggcatcgacaagggcttagcgggccaactagcaatgactgctttggacctcttgaatgagccagcttcagccccctcctcggtaccgccacaacccaattcatag

SEQ ID NO: 537186 - DNA, 234 bp, Stenotrophomonas maltophilia
gtggacactcacacttgcgagaacagcgccgcgcagctgaagcagttgcgtgacgcttatcaaagccaactcgatgcaagcgtcatcgaagaactcaacgcagttatcgcggcgcttgaagcgggctgcgaccgtcagaacaagaagtcggcagaaaatctgacatatcgagttctgtccatcatcggtgatgtgcttcgaattatttcgaacatcacagatttgatgagctga

SEQ ID NO: 537187 - DNA, 237 bp, Stenotrophomonas maltophilia
atgaagaagaccgcgctgcggccgagaccgtccctgctgctgttgtggctggcctgcgcgctggtcgtctccagttgcgcgacgacctcgccacctgcagtaccgctcgcctgtccgaagccgtcgccggcgccgtcgaacgtgatgcgcacgcccaattacgagcagaggtcgcgggagatcttgttcagatcgggcgcgatgccgacgaccaagtccgagcctgccaggcagtga

SEQ ID NO: 537188 - DNA, 672 bp, Stenotrophomonas maltophilia
atgagcaacgacaacaaggccctggcggacgtgcagcccggtcggaaggtgaggctgggggatcaggcggagcgggcgcggtttgaggagtgggcccgcacggaaaggctgccgcttgcccggggcaagctcggtggctatgccttcgaagtgacggcaagggcgtggcgcgcttggcaatacctctccgcccagcccttcccgggtggtcagggggatgcgccgccgtgctggtggattgaccacggcacctatggccagattacccagcgccaggacgaagcggatgccactgtcaatgctggaaaacgagtggtttcctatgccgcccgccagccggtgggggagccggccgcatgggtccataaggaagaccgggaaagggtgatctctgcgcggcagaaggcaaccgcgctgcgcgatcaaggggccagcggctcgtcggtccgaccgtactcggtgcctgcctacctgcatgcacccgcgcaggccgtggacctggccgaattcaaggcgctgtatcgagcctacgtgcgcctgctggagtctgcccgggatcgcatcctggatcttggcggcacctgcgatccggtcgatgtgatggacgccaaagacgtagacctgcaggctgcgcggcgcgtcatcgacagccaggcggtgggcaatggctaa

SEQ ID NO: 537189 - DNA, 633 bp, Stenotrophomonas maltophilia
atggctaagcgatcacgttgcctaaaggatgctacgcaaagccctgcgagcgccctcaataaggcccctcagcatatccagacgctcgttggtctcctgcaaaagtcgatcgcggaattgcccatgaaactcgccgccgacgcgctgatagtgatcaaccatagcgttccattccgcaaggctattgcgcaactgcgtcaagatgatcaagagttccttcgcttccaaagtaggctcaatgctgcgatcaacttggggaagccgcatttgcgcccaatcggcgaggaggaaccaggtctcacctgcaatacgcgcctcaataagttggctgacgttccgcgctttgacccacaagctgtcaaccgcagcctgtacatccagggcagcaacgtactgctgaaccttctcttttcgacggctggcgtagtaaggcaaaagcacggcgagaaatgtcgcgatcgcggctgcccaagttcctactgccccgattgcatcccaccagaccacgcagtcgtctatacccagctgcttgcaacgaaacaccccatccagcgcgctcattccctgatccccctgtggactgggcagcattctgacatgccgcagcagcgggcggtgcacgcccatggctga

SEQ ID NO: 537190 - DNA, 213 bp, Stenotrophomonas maltophilia
atgctggccatgacctcgaaccatctgcgaacggcccccctgaccaagaaatcccaggtatcggacgtgctacacgccggcggtcgcatcgtcgctggccaccggcctggcctgctgcagttgctcgatgccgagggcagcccagtccctgcctggcaaaccgctctgaaggccgccaagtcctcgtccgcacaatccggagatactccatga

SEQ ID NO: 537191 - DNA, 618 bp, Stenotrophomonas maltophilia
atgacattactgtattccgtagtcttgctctgtcgcccaccaccaccccatcccggggccgggcgcaggagatcacgcatgtccaccgacgccttgcagctgctcgcaattggattctcagtcttggcgctcgtcctcaacgcttggacttcctgccggctccggcagagtaaccagcagcacgtcagctcccgggagtgctttccggagttccgcttggacgcgttcaagtcggcgaccgagcaacacgcattcgagtccatcggcggtcgtcgccgtgaccttggtgacccaaaggaagaatgggacgtagtctgcgggtgcggtcgccacgaccgatgcccctggttccaggcggcccagcagctttctctcaatgtcggcgctgccgtggatcggcatctcctttgtcaggtcacctctggcggccagcacgcgaacggacttgatagtcactggcaccccgccgggatttatcacctcacaccaaaggctcggggcctcggtcccttgggatttgtcatagccgcactggattcgggctcgccgagtaccccgccggtagttggtccatgtgttgaacacaccgagcgtggcgcccagcaccgcaatccctaa

SEQ ID NO: 537192 - DNA, 252 bp, Stenotrophomonas maltophilia
atgccttgggttgagccggcgtcatccacggacccgaaggtgtacaagtttgtggccggcgatcttcgactctacttctgctacgcggacggtgcagtgctggtgtgtagcagctgcacggtcaaaaagactcagaagaccgaacggcttaaggttcaagaagccgtaaaactactcaagcgctacaaggacgcagtggccagtggagcactcaaggagtaccccgaacatgaccgaattcagaacctttaa

SEQ ID NO: 537193 - DNA, 411 bp, Stenotrophomonas maltophilia
atgaccgaattcagaacctttaactcgctggttgacgctgtccaagaagagggagacctctattggcaggaattggccaagcttgagttcgcgaaggacatctggtcacttatgactggcaagggaatcagcaaagctgagctggccaaaaagttggacgtgtcccaagcgcgagtaactcagtgcctgcggggtgacaagaatctgcagattgagacgatggtcagcatcgcgcgcgctgtgggcggagagctgcatctccgcgtgcatgatcgagcgcacaggccgcacttctttgagagcatggatgggggtaaggctaaccggccgaagttctgccctcccaacttgaagcaagaccacaagatctccattgagagcagcgatgcaaaagccgcgtctttcgcttga

SEQ ID NO: 537194 - DNA, 546 bp, Stenotrophomonas maltophilia
atgcaaaagccgcgtctttcgcttgactactactatgtaactcggtcgaccttgatcgcgtctccagttgaggatgaccgcgcaacgcgcgtcgccccgaaattgagctacgaggcacacatcttcgaagacaaatcgcttttcgtttttgctcgtgtgacttggggcgccgagggcgaaacaccgtactacattcaggcggaggtcaacggctccttccaagttgacttgtccgagttgcgaggcaaggtcgatgcagatggtgtgcggctgatgtttgcgaacatggctgtcaatgcagcgcaaatcctgcacggtggtctgcggggccatgtttcatctatcacgtctgtggcacctcacgggacctggtacttgcccacggaaatgatcagcgcgatggatgtggagttgtacgtccgcgatgaggaagagttgataagctcattggcaaagccgccgaggaaacgcaaagcttcgaagcgacaggccgcctctatcgaaaagaccgaggctgacaagacggcaaagaaaaagccccagtga

SEQ ID NO: 537195 - DNA, 477 bp, Stenotrophomonas maltophilia
gtgaagcgcgttgccatcacagtcgccgcgttcgtcctgtggtccggcgccatggtcggagttggctgggcctggcgcggtgaccgggcagagggcagagaggccacccagcgcgccgccggtgccgaggcagctgcagcccaggtcaaccagacccgtgccaccgagcacgctcaggccgagacactggccgccattggagcgaagcatgaagaagaccgcgctgcggccgagaccgtccctgctgctgttgtggctgacctgcgcgctggtcgtctccagttgcgcgacgacctcgccacctgcaataccgctcgcctgtccgaagcggtcgccggcgccgtcgaacgtgaccaggcagcccaactacgagcagaggtcgcgggcgctcttgttcaaatcggacgagacgccgacgaccatgtccgggcctgccaggccgtgatcgcagctgaccgtcaaccggtgacgccatga

SEQ ID NO: 537196 - DNA, 513 bp, Stenotrophomonas maltophilia
atgcttccctcgcacggctatcaaggtttccgcaccgccccgatccccgctggctgggtccagaccggtgagcgctgggcgctctggtacaacggccgggaaacggcgaacgtcacgctcgatggcggtcctggcgtccggctgtggatggagggccagaagatgtggcacaccaaggaagcgcgcgccgccaacgtccgacaggcgaagcgctacgccgagcgctggtgcgccgccaggctgtatcccgagctgcctctgcgtgaggccgttgcccggctgaccgacagcacaccgatccagttgcccccgccactgcctggtctgccgccgacgcgcgagcagcagcaacaggctcggcgcctggcagaggccggagcgaaggagatcgagcgaatcaaggcggcactcgaaccgcgcaagccgccggcagagaccaagccccgagcgagggacatccgcagcaaggcgcgggtgagggcagggctggagcagctacggcgaggggtgtag

SEQ ID NO: 537197 - DNA, 615 bp, Stenotrophomonas maltophilia
gtgattgatctctcgtgcctctgtcgccaggacatcatcgcccacggcatttctttcagtgcgctgttggggacacctttggacaggcttcgctggggcggttcgtgcctgtctgtgttgaagttgcgcggacaggtgaccgagcacgccatgcggcgcttcgcgttgggccaggacttcgatgggattcagcaattgtgggagggcgccgctcattacgaaagtgcagcgggctaccgggtggggtttcgcctgccggagggatttatcgatgagttggcgatggctgacgcggaacaacgcgacctgctgcggttcgcccaccttcgagccgttggacgtgcgttgttgtcgctggcatgccaacgggatcaccaggtgctgtttgtcgcgtccgataggttggaggatgactggacgcaccactggctgttcgccatcgcatgcgcaccgaacgggaagtgggaacggcttgcgctgagtttgcggttggcggccagcgaggacgcttacacccacgccatgggtgccttcatggaagcgttgctggagaccaaacgattggagcgcttcttccgcccagcccccgtgggccgaccgaggcagaggctgtga

SEQ ID NO: 537198 - DNA, 153 bp, Stenotrophomonas maltophilia
atggccagctacgcgatccaggacaacatcagcctgcagctcaacgtgcagaacctgaccgacaagacctacttcaccaaggcctatgcctcgcactacgcgagcatcgccccgggtcgctcggccaccctggcactgaacgtgaagttctga

SEQ ID NO: 537199 - DNA, 273 bp, Stenotrophomonas maltophilia
atgtcggtgaagcgggccaggctgttggcggcgcgcggcggtagctgctgcagggcgccgatcgcctcggcagcctgtgccatcggcatgtccttttcctgcgccagctcggccagcctggccagcgtgccggcaccgacgtcgcgcttgggcgactgcaccgcacgcatgaacgcggtgtcgtcgtccgggttcaccagcaaccgcagccaggccagcgtgtccttcacttcctggcgctccaggaacatggtgccgccggtcaggtggtag

SEQ ID NO: 537200 - DNA, 324 bp, Stenotrophomonas maltophilia
atgaaaggctatcagctgacatttttcacagcgcaggaccgcaggcatcggcacacccccatcggcgagtggttgctgaacatcgccaaggagcacggtgcagtaggcggcacaatggtcagcggcgcagaaggattcgatcacgtcgggcgcttccattccgcgcatttcttcgagctggcagaccagccggtcgcagtcaccgtctcggtggacgaggcagggtaccaacgcctgatggacgcgctcgctcaggaagagatcagcctagcctacgtgaaagtacccatcgagtacgggcgcgtgggaaaggccgcgagataa

SEQ ID NO: 537201 - DNA, 396 bp, Stenotrophomonas maltophilia
atggcgggcgcatacgcaatcctcgctctcagcatcggctcggtgatcggcgccctagttcgctatggattgagcttgagcatgaacgcactcgtcccgcatatcccaatgggcaccttggcatccaacctgatcgcggcctacatcgtcggtgtcgccatcgcctatttcggctcgatgccgaacctgtccccggcctggcgactgctcatcatcaccggattggccggagggatttccaccttctctacgttctcggccgaactgctgacgctgctacgcgaaggtcgcctcggatggtcggccggcatggttgtcctgcatgtgggtggttcgttggtgctgaccgccctgggtatggccaccatttcgctcgcccgacaatcttcaccctag

SEQ ID NO: 537202 - DNA, 402 bp, Stenotrophomonas maltophilia
atgatctcaaagttcagccagcagcatatcgtcgccctacgactgtatttcccaaccgccaccaaagccaaggtcacgcgcttctggcatcacttgagtgcgcctgcgctggcacatcatctgctgacggtcgccaagaaggccaacatcgtgcaggccatactccatcaggttggttctggctacctgcccggcgagcgcctgtcgcaccatcatcctgaactaacgggcatgcggcacccgcaatgcttggagttgctggataccgaggagcgcctacgcaagttcatgcacgagcatcgcgaggaactgcgtaaggtgcatgccgtgctgttcctgtgtgaactgccgctggcccaccaccgcaccgtccatgcagcatgtaccggcgaggttagctaa

SEQ ID NO: 537203 - DNA, 1440 bp, Stenotrophomonas maltophilia
atgtctgaggaattggccctcaagctcaacgacttcactaccaaggggtatgtgatcgcgccggccggctacggcaagacgcacctcatcgccatggcagtgaaagctgccagcaagaagcaactgatcttgacccacaccttcgcgggtgtaaactccatcaaggccaagatgacggctcttggcgtgccgtcctccaagtaccagattgacacgattgcgagctggtcgctgcggctctgtttggcctatccgaagacttccggctggaagggagagcaccccacaagcaagcagtggaacaagctctacgagtgctgttctgggctactggggaagcagttcgttcgccgcgtcgtcgctgccacctacgccggcgtctatgtggatgagtaccaggactgctctgatatgcagcatggccttgtatgtgtctttgctgagttcatgccctgccgaatcttgggcgatccgatgcaggccatcttcgactttggtggtgacgaaggcaagcccgttgattggacggtaagtgtctatccgacgttcacctgcctcggtcagctagatactccgtggcgctggaagacaacaggtgacccgaagcttggggattggctcaagaaggcgagagagactctggaacagggtcagaagatcgatctttcaaatggcctgcctgcatgtgtgaaacgtgcgcatacgaccccagaattcttggcgtcaaagcagtactcctctctcatggacttactggggaatcacgatagtgtgattgctctgcatggtggcgatcagcaatacaagaacaagacccatctgttagcacgaaccatggggggaaagttttcttccattgaagaggttgagggcaaggatcttcactcattcatcaagaagcttgttgcagcccaaacaacccagcaaggcttcctcctagctttggttttttccaagaagtgcttcactggcataggggacattttgacggcggggacgaagaaaggtgaggtcgcaaagcagagcaaagtcaccaagtacccggtggtccttcatgctgccaatgcctatctgaacagcccaacaagtgctcaccttagagcgttcttcttggcgttaaaggacaaccctaaaacgtcagcctaccgtcgtgacctgctgtatcgctttctcaacgttctgaagattcacattgacggtggcggtgcgacactggtggacgcggtaaacctgtaccaacgtgaaatgaggcgaacgggaaggcccatcagccaccgtaagctcattggtacgacgctactggtgaaagggcttgagtacgaccatgcagtcattctcgatgcagacactctggacgcgaagggtctgtatgttgcaatgacccgtggcgccaagaccctgacgataattggcgagcagcggtacctgccggcaaggtga

SEQ ID NO: 537204 - DNA, 1707 bp, Stenotrophomonas maltophilia
gtgaagatcagaaaagtaaaaatccagaactttcgaggcgtgaaagaacttgactggagcctccccaatgccgacatcttctgcctgattggcaaaggtgattcttccaagtccacgatcttggaggccatcagatatgccttccatccccagtggaacctgaccctcagcgactctgattttcaccagtgcaatgtcgccgactcaatcgtaattgaagtcaccatcggggccttaacagaagcgttctgctcgttggacaagtacgggctgtacctccgcggctgggattcagcgacgctcaaactcactgacgagcctgaagatcacttggagggtgtcttgaccgtgcggctgacggtcgacaaggatcttgagcccaagtgggtggttgtctgtgatcgacaccctgacggtgttccgttcaagcagggcgacaggaacaaggttagtgttggtctcatcggtgcctacagcgagaagcagctttcgtgggctacaggcacggcgttggcaaagctcactgaggcacagagtctgaacgagctgctggcaactgcctctcgcacggccagagcctccttggatgccaatcggcctgtcaccctcaagaacttcgatactgcggctgagaaatcgcaggagattgcgaagctgttgggggtgccggtgtcagacgcctacaaggctcacctcgatctggcttctatcaacctgaaagctggtgggttagcgctccatgacggtgacatccctcttcgtcagctaggtctggggtctcggcgaatgctgctgtgcggtattcaaaagatgggtttggaagagggccacatcacgttgtttgacgaggtggagtttggcttggagccgcacagaatcacccgtcttatcaagcacgtccgagaggacaaacgaggtcaatacctcctcaccacgcactcgcccactgtcctgcgagaactgactgtcaaagagctatacgtagtgcatagcaagggcggggtagtgcagatcacttccgcagcgaaggacggtctggaacagcttgaagtgcaaggaaagattcggtccagcactgaagcgttcttggcgaaaaaagtggtggtctgtgagggcgctaccgaagttggattcgtgcgaggatttgacgatcaccaagtcggcaagggcaaggaccctctgtcctatcacggcattgcccttctggacgcgaagggtgccagcaagatcaagggcttagcaaaggcgttcaagttgctcggctatgacgtttcagtgcttgcagatgcagacgctgaagatcagttctctatggcagacgctgctgcacttgtgaaattgggtgtctcggtccacatgtggagcgacaagctctccttggaagaacgagcactccaagatttgccttgggaaagcgtactgttcagtttgaggcttgcgcaagatgagttgggctttgctgtctatgaccaggtgcgctccgagtttcaagaggcgcttgaccaggacatcgctaagtgggctgatggtgcgaagctgcggaccgtgattggggttgcagctaagaagggcggctggttcaaagacaccacacggggcgatcagtggttcaaagtcgtgagccctgcgttcaacgacgccgcattctcaaggagggacctggcagtcaaactgggggcgctttggacttgggcagagcatgtctga

SEQ ID NO: 537205 - DNA, 243 bp, Stenotrophomonas maltophilia
atggagatgagagataaggtgcgggcgcgctttggcgttagcccgattgacgccaacgacctatatctctccaagatccttgatcacggcctgccccttctccaggaaaccagccaacagccgtcctccagcgacctgtcgccctacgcgttcattgagccaagtagcctggaccttgccagcagcaagaacgtcggctggagcgaagctatccggcctgccggccagcggttccccaggtga

SEQ ID NO: 537206 - DNA, 312 bp, Stenotrophomonas maltophilia
atgttcaagcgaggggaagacgcgttcctggtgctggagctacgcgtaagggagtgcgagcgccgtatagcaaagtccgatggccgaaccagggcattggaatgcgccatacgggcggttgtcgacaatgtttctaatccctcggccttgcgtgccgcgtgggcgcaattgattccgatggccctggagaaccacgccgaagagcgtggagaagcggccaatgactacgtcgatggtctacgccaaggccttaagttcgttactgagcagattgacgcggccgcagaacggccctgccctcctcggagatag

SEQ ID NO: 537207 - DNA, 288 bp, Stenotrophomonas maltophilia
ttgggcctcgacccgccgatcggctataagcgctgcttgctttcaatggagtattcccccttggtgctgatcaccctccagtcgatcaatgcggaaatcaagcggctcgaagcccagaggctgctggtggaaaagcgcgacgatgaagtgcccaaggcgattgcggtgcttcagaagtatgcaacggctctcgctcaacgtcgccaggttgcgaagctcattggcaaggccatcgacgtcaggccggcgagtgccaagaagaccgctgctgggccgctaaagggctga

SEQ ID NO: 537208 - DNA, 300 bp, Stenotrophomonas maltophilia
atgcctgcactgaagcgttccgaccttcgatatcaatacagctggaaagtctctgagggagataacccaagacttatcgatagcgatgcatatcaccttagccgcaatgaaggttacgagatgctgctctacctcaatgggctcaaagcccagaatggggctgacttacccgtcaagacacggctcatcgtcgaatggatgctcaaagagcatttcaaatccaccgcccctgggcgttccacagtgacgcaatgggtggtagacaactgggatcgcctctcaccccactacccaggatag

SEQ ID NO: 537209 - DNA, 1944 bp, Stenotrophomonas maltophilia
atggacgagacgcaagaccttttcttcgagacgcggtttctggacagctatgctggctccatcatgaccgagcccgccaccgccatcgtggagttagttgccaacggctgggacgcttacgccactgaggtcgaaatcctctggccggatgcggagaccgagagacagttcgtggtgcgtgataacggccacggcatgacgttggaagagtttcgtttcatctggcgggcgatgtcctatgatcgagtgaaacgatcaggattgatcgtcgagccaccatcgaacctagatgggctgcctcggcctgtcttcggacgaaacggcaaagggcgctttgccagcttctgcttctccagcgaatatttggtcacgtcatgcaagggtggcgcaaagttcacatgcagggtaaagcgatcacctaccgctccgcttgtaatcgaactcgtcgaacacatcgagtccggcgtagagggccacggcacagagatccaagggtgcggagagattgcacagattggactggacgaggcgggggcgcgcgacatcattggcagccgatttctagccgagccggcttttaaagttcacctcaacgggcgtcagatttcattttctgacatatcaagtcagtccctctccaccacgacgctcgctattcctgggattggcgaggtgacgattcatcacatcgatacacggaaggcagacaagacgaccaagcaacacggcattgcgtggtgggtgcagcgccgtgcagtcggtgatttcggttggcgcggaagcgacgttgatcgaattctggatggccgctcatcggaggcaaagcgcttcaccttcattgtcgaggcagacttcttgaaccaagccaacgccgttaaggccgactggtccggatttgaagacgacaatgccatttggaaggatgtgcagctggcagtgcagcagcgcatccgagaaatcatcgaccagaccaatcaagccgctcgagagagcaagcgcacaagtgtgtttgatcgggtcggcggcgccgtcaactctttagccccgctcggaaaagacagggtgactacattcatcaatgaagttgtggacaactgtccgaactttggtgagcaggaaatcatccaactgactacgatcctcaccaggctcgagaacagtaagtctctctacggcttgctggacgtacttcatagacagagctcggatgactacgacgtcttgcacgagatgctaacggaatggaccatcggcctcgccaagattgtgctcgatgagatccagacccgcctgcgcctgatcgaggagttgaagcgaaagctggaagagccgggcgtggacgaagtccatgaactacaaccactcttcaccaagggcctttggatgtttggcgctgagttcgaatctatcgagttcacctccaaccaaggcatgaccaaggtcattcaaaacctctttggcataaagggcggccggggcagccgaaatcgcccggacttcgtggtgttggacgatagcagcatcggactctacgcaagatcatcttacgatgagaacttcaatgaagatgggattgagcatttggtcatcatcgacctaaagactacaggactagcgattggatcgaccgaaaaggagcagatttggaagtacgtcaaagaactgcgttcccgaggacaccttcgattgagcaccaaagtcgacggcttcatccttggggaccgtattgaagaaggtgagggacagcctcgcatcgagggcgatacggttcgcattactccacttcattacgacaccatcgtccggcgtgccgagaagcgtttgatgaacctatattcgaaagttcagactgcccctttcctagaagagggccgcgcgtctttggaacagttcttggagcccgtccctgttcaacaagcccaactgctggatgtcaggctgtga

SEQ ID NO: 537210 - DNA, 333 bp, Stenotrophomonas maltophilia
atggccggcgactggctcatgatgaagatggaggacgttcagcgcctggtgacccaccggttgcctaccgactccgccctgtttgaggatttggaagcccggcacctggcccttgccggggccgaccgaagcagcttggcgcccctgcttagtcaaatccgcagccgaaagtcctacctgatgggaggaccggctctccacatcttcgtggtgtcgctgcgttgccaccacacctgcaactattgccaagtgtcacggcaggaaacgagcgccacggcgttcgacatggaaagcgcgcacgccgaacaggcggtggaacggctgttcgaatag

SEQ ID NO: 537211 - DNA, 342 bp, Stenotrophomonas maltophilia
gtggtattcgaggagttggttgatgcactgcccccgatcgctggcaagccggggcgtccgcaacgctggccgggcaagctgcacgccgacaaggcctacgacatcgaccgctgccgcgatcacctcaaccagcgaggtatcaccccgcgtatcgcccgcaaggggatagaacgcaacgataggctgggacgctatcgttgggtagtcgagcgcactcatgcttggttcgcgggcatgggcaagctgcgcatccgtttcgaacgccggatcgatatccatctggccctgctgtctctcgcctgctcggtcatctgtcttcgccatcttcccgggttttgttag

SEQ ID NO: 537212 - DNA, 402 bp, Stenotrophomonas maltophilia
atggcacgtcgcaaagagattcccgccgcgctgtggaagcgcatcgaacctttgatcccgcccgtgaagccctcgcccaagggagggcgaccgcgcgtgagcgaccaacaagccctcaacggtatcgtctatgtcctgcgcaccggcatcccgtgggaggagttgccccaggaactgggctacggcagcggcatgacctgctggcggcggttgcgcgactggcaagccgccggggtctggcatcgtctgcatcaggtcctgttggccgaactgcgccgggccgacaagctggacctgagtcgagccagcctggacgcggccagtgtggccgccccccggggggcgcctacaccgggccgaacccgaccgatcgcggtaagctcggtagcaagcggcacctga

SEQ ID NO: 537213 - DNA, 714 bp, Stenotrophomonas maltophilia
atgcccccgcaatgggcatatgcccgcgccaggcttcccaaaattccccctcaacagaaggagattcgcaatctgctggacgttctcggttcccgtgctgtgctgggtcacacccatcccatagccgtcgttctcatgacgtgcgatcacgtcgccaaggtgatctacggcggctatgtgccaggtctcagcgaggcgggcagggtagcgttccccctgttcgcactggttatggcctacaaccttgcccagcccggcgccgacgtggtcaagtcggttcgcaggctcggcatgtggggcctgatcgcgcagccggtacatgcgttggcattcgggtactggttgccgctcaacatcctgctcacgttctccctgtgtgctgccgtcatctatgcagccggccaacgaaggtgggttgccctggcattcgccgcggtggcgctgccggcattcgtggactaccaatgggccggggtagggttcgtgttgctggcgtggttcgccttcaagtggtgccggttctggctgctggtgccagcattcgccgcgatctgttggttcaatggcaacctgtgggcgctggcagcgattccggtggcgttgggcctgtctcgggcgtcatggcctgtgccgcgggggcggtgggccttttacggctactacgttgcgcaccttgcgtgcatcggcctgctggcgcctatactgcgctcatga

SEQ ID NO: 537214 - DNA, 2034 bp, Stenotrophomonas maltophilia
gtgacgctgccgatcgaggagcctttccaagggtacctggatgccttggcgccgctgtttgcgcaggcgccagcggatgcgaccgaggagaatctgcaatcgcgcattcgcggtgcgctattgatggctttggccaacaagttcggcggcctgctgctgaccaccggcaacaagagcgaatacgcggtcggttacaccacgatctatggggatatgtgcggtggctatgcgccgatcaaggacctgtacaagacagaagtctccgcgctcgcccgctggcgcaacgccgtggcgggcgctccagtggtcccatggggggtgatcgatcgtccaccttcggcggagttgcgcgcggaccagaccgaccaggacacgttgccgccgtacgacgtgctcgacgccatcttgttccgctctatcgatcaggagcagtcgcgagaggagattgtcgcggcaggattcacccccgaaacggtcgaccacgtgcttcgtctggtgcgcatcggcgaatggaagcggcatcaggcggcgccaggaccgaaggtctcgcgccgcgcctttggtcgggagcggcgatactgccgccaggtgggcttgccgacctctgcggtgggattcgtcaatgccttgcagtccaaactgatacaagtcgcggacctgaccgatcagggttacctggagaacggccaggtgatcatcggcgacgacgggttgccggtactcaagcgccacaaggccaaggacatgagcagcggtgcccgcgctttggaaaccgcgattcttgctcgcctgcgcgaacgcagcgtcatcgagatcctgtgcgacgtggcccactggacccgctggccacggcatttcggaccgctgtccggatccgacaccaagatcgaccagcccaccgaacgctacgtgctgacggcattcacctacggctgcaacctcggcccggcccaggccgcccggcacctccgtggcgccgcttccgcgcacatgctgtcgttcgtcaatcgtcgtcacgtggatgcgaacaagctggcagcggcctgccgcgacgtcatcaacagttacgccggcctgcagcttcccaaattctggggcgatggcaagcgtgccgcagccgacggtaccaagtacgacctgtacgaccagaatctgttggcgtcgtaccacatccgctatggcggctacggtggcattgcctatcatcacgtctcggacacctatgtggcgctcttcagtcactttattccgtgcggcgtctgggaagcggtgtacatcatcgacggactgctgaagaacacttccgacatccagcccgacaccgttcacgccgatacccaaggtcagtcgctgccggtcttcgggctatcgcacctgttgggcatccagctgatgccgcgcatccgcaactggcgcgattatcggttcttccgtccggacgaggacagccgctacgagcacatcgatgcgctgttccgggaggacatggactgggacctgatcgagacccactggaaggatctgatgcaggtggtgctgtcgatcaagtccggcaagatcgccgcctcgacgctgctgcgaaaactgggtaactacagccgcaagaatcgcctgtaccaagccttccgggcgcttggcgccgcagtgcgcacgttgttcctgctgcaatacatttctgaccgcgaactgcgtgagcagatcacggcctccaccaacaaggtcgaagcctataacgggttctccaagtatttcttcttcggtggagagggcgtcattgccgataacgatcccctcgaacaagagaaggcggtcaagtacaacgacctagtcgccaacgccgtcatctttcataacgtggtcgaacagacccgcatcatcaagacgctgatgcgagcaggttggaagatcaccccggaggacgtggctgcactcagcccctacgtgaccagccacgtgaagcgcttcggcgattacctgatcgacgtggacgctcttccggaaccgtacgaaatcgaattggccttggccgcgtag

SEQ ID NO: 537215 - DNA, 180 bp, Stenotrophomonas maltophilia
atgtccggtgcaagcatggtcaggcgcagcacttcggatacccagcccggttccagtttccgcgcgcgcgccatatctaccatcgtcgggtactcgccgtcgtcgagcagccgcttccagtggaacgccttgccgagcgtcttgatcatcggcgcatccaagccgcccaccgcgccatag

SEQ ID NO: 537216 - DNA, 516 bp, Stenotrophomonas maltophilia
atgaaactgattccgtggctgtaccgctggctggccatggctgcgttggccgctgccctgatcggcgtcggctggatcaagggcgcgagccacgttcaggcccagtgggacgctgccgtccagcaacagacccagcaagccgccaccgtccgcgagcggcaggcgcaagccaccgtcaaggtcgtcaccgagtacgtcgaccgcgttcgcgtcgtccgcgagaagggcgacaccatcatcaaggaggttcccgtctatgtgcccgtccaagccgatgctgcttgcactatcaaccgtggctttgtgcgcctgcacgacgctgccgccgccggtgatctgcccgaacccgccggagatgctgatgcggcccccgcaggcattgcgctctctgccgtcgccggaaccgtcgcggccaactaccagacctgccacgagaacgccgagcaactgagggcgttgcaggggtgggtcatggagatgatggtctccaatcaccaaaaggaacaaggccaatga

SEQ ID NO: 537217 - DNA, 1296 bp, Stenotrophomonas maltophilia
atgaagctacgtagacagaaaattgcggagcctgctgagactcgcaggcaagtcgaacgctttttttcgagccgaggcaaaaccatgagctcagaacattccctacacgctgatagccgtgtaaactgcgccttatatccgaaattcagaccaagcacaagtatcaagaacgtggccttagcctacaacaaagaaaatgcgctgaacgcaatttgtccctactttacgatgtttcctcttgagtacccaaaccgggtgctaaaaaaacatctgaaggaagatccgactgtgctcgatccattttgcggtcggggcacaactctattttctgcgcgaaggcttgggctttctgcttggggtattgactcgtcccctgtcgctgttgccattgcaaaagcgaaacttgcgagttgcgatcatgaggagccgctaaagctcgcagctaaattgatcgcagctaccgatccagccgacgtaccagatactccatttttccgctcggcctatcataaatccacgcttcgtgacatctgcgcattgcgcgagggattgcttgggctcaaacatgaaacggacgcttcgtccattttgcgagccgctgcacttgggtgcttgcacggcccacttcccaaacatgtcgagaacgctggctatttttcgaatcagatgccgaggacttatgcctcaaagcctgattatgcagttcgattctggaaggagcgcaacctaaaagcgccaaagatcgatgttctccgagtgctgcgccgaaagatcgaacgcctagctggacttgatcaagcatccccttgccccgtttctcatgttttgcaaggagacgctcaatcggaggagttgtttcagtcgatcagcacggcaccgtcgattgtgatcacgtcccctccttactacggtatgcggacgtatgttcaggatcagtggctaagaaactggtttctgggtgggcctgaatccatagactactctgctgggccgcaactggatcatggcggacagcaggtatttgctgcatcacttggcaaggtttggaagaatatcgccaacagtgcggagtcgtccgattcgcttcatatgtacgtccgattcggaataattccatccgcactggttgatgcaaaaaaacttttcagagcctcgctggaggagtccggagtcgattggcgcttggtgtctacgcgctcggcaaaaacagcagatgtcggaaagcggcaagcagatcaaatgaaagctgaatctgctgccgccgtcgaattcgatttccacgtcgaaagaatttga

SEQ ID NO: 537218 - DNA, 4248 bp, Stenotrophomonas maltophilia
atgaccaaaaaaagaatatcaaagagcacgctctcaatgttccttcgtacgaagtgcgaccgtgagctctatttgtccctgcatgaagattccgagcttgatgcacatggaatgcccgttccacttcaggcgcgccccggaattggcgtgctgcaaactgctggtcgagattttgaggatgaacgtaatgatcaactgatccaggcgttcggcgcgctggtcatctatcaacccgacagggctggtacgaacaagcccgtcaaagctccgctggcctcactgctcggaaaggtaacggcactaccctcgatcatcctgcaagccaagttcgagccgtcatcctttcaaaacagcgtaatggcaaacatcggtctgcaaccggcgcaggttgcccaagttccgccaattgcaggactcatacctgacatcatcgttgtacgccaagcaagcgccgatgatgaagaggtatgcccaaacggatctaggaaaccgataaatccggcgtcagagacacgctgtgcgttgagcatcattgacgtaaaacataccagcgaagcaaacccaagctattcagcggaagtggcactttatgcacttttccttgccaactgggtcgccgatcaaggactgcaggatagttacttcgtcacgactcgaagctatttatggacacgtttcaagcagggacagtctgcgctcgatggggtgatgactagtgcttctgtagcgacatcgagtcagtatctggacgcgctaattgccgacagcgaggatgccaacctgcgcttttatctaccgactgtgctgcatttcttccgggaggatttactccgggtcataaccgttggtgatagcgcgcccaacggttgggcaaaccttgagtggcacgtggacggtcgctgcagtgcgtgcgactggctgggacatgaaaaatgggcgaattcgaaggataaagtgagaattgcggcgcagccaaaccattactgctatccagcagcgaagctcactgggcacttgagtcaaattgcaggcatgactcggggcgcgaggaaaacgctccagatcaactctattcaggacactgcgggagcggcggctgccccttctgcgcatcctgcttttcagcaacacagccacctcaagaaggatcgcagccgcattcccgcacgtgcgaatgcactcatctcctcgacgactacagtagataattctgcagtgctcgcaagtttggcgcctgcgccgcagctccatgcggctatcacagtgaatttcgacccaagtgccgggctacttacgggcttgtcgatatttggtcgcgcaaccgcatatgtatcgggacagtcccctcgtcagtttgcgccgaagtgctttgtcgtcgaccaaaagaatttggctgacgaatgggttgctctggaggggctgctgtcaaccctgtcggacatggtcgatcaggcagaagcatttgttcgtgccgcaaacaagacgccgctaactgcgcagattgccttttgggagcagcgacagtttgaagaactgtgtgcggcgatggggcggcatttgccaagggtactgggcctgacgaaccgcaaaaccaaagcgttagcctggctgttcccggctgatgagttgatcgagaagccggatggcgctgtcagcccatgcattgtcttcattgacgagattgtccgacgagtggtctttgcgccaactccccacgtcattacgttgttcgatactgtcgaaacgtactactcggggccggggcctgttcgtctgggagatgcttactatcgggagtttctgaccaacggcattccgagagagcggatctacgagatctggagcaacgtcacaaccatcaagcgaggttcagttaccgtccctcgaaacacggtgattcaggagttcggcaatgccttggaaaagcaatgccgcgcattgaatagcgtggtcgagcggttgcggacggatttcaaggggcagttgaaggctaatgctccgaagttgacgctttctataccccagggcagtcgtgacgttgcgttcgatggcaagctgtggatctggtgggaggaactgcaatttcagaccaggaaactggaatctcatcagcgcctagcgcttgatgctgaagcattggaggcaagttacgaggctgtacgccttaccaatggccagcccacgggaacgccgaacgagtacctctatgatgtcctgcccgggtcaaccgaagccaagcttgacgacaatgagggctatcttgccttgggcaaagagggattcccagggcttccacttcaacgtggaaaggatctgattcccgtcacagccccgccctattctgggcagggagacacccttcttaccccgttgtggtcggcgctctctgtgacgttgatgtcattcgaccgaggaacacgcaaagctgttctgaaattaagcaactggcgtgaggccgcattcgcaccgtacctgctggccaattcaactgtcgacctgctgaacgatattttcatcaccaaaggtcaaggctcattcaagtggtatgagacggtcaagaaaatcctggtcgctgttggtaacccaccgattgcagttgccgataaaaatgctgccactgcaatgggcgctaatgcggcaaggccgggtaccgcagccatcactccacttgctcgcattctttgggaggctgacgtcgtccacgccacatcggttattgcttcgcctcaggccgcatcaatagccgcctacgccaaggccaagcacaacctgaatgccagtcagactgatgctgttgcccacgctgctgaaaaaggtttgaccatcatttgggggccgccgggaaccggaaaaactcagacgcttgccggatgcatccatgggctcgttcataacgctgcgcagaggagtcagccgttgaaggtgctggtcgccgggccgacctataaggcagttgaagaaattattagccgcgttattgaatcgttagatgctgatcccgcatgcccggcagagatcttcgtgggatattcctcatcgcagactcctaagcctttcgctgcggccaatcctcatttgcgtgttgaatcattcaatctcagccaatccaaccaggaaacgcaggactgcctcgctagtctggcgagcactgagacggtcaccattgtcgccacttcgacaatgcaggcatacaagctcgcagactggggttgcggtagctgcgttggccctgttttcgacgtcgtgatcgttgacgaaagctcgcaggttcaagtcaccacagcaatttctccgcttgctactttgaaagaagacgcccgactgatcattgcaggcgaccatcttcagatgcctcccatcatggctctggaaccacccaaaggtgccgaatatttggtgggcagcatccagaaatacctactcgagcggccgtttggaaatcagataactccgtgtccacttgaagagaactaccgttcggctgaagacattgttgcctacgcccgcacgatcggctaccgatcgacattgacagcgtcgaacggtgcaacggggcttcatctcttggcgacggtgccaacttctgcttctggctttccaggagccttaccttggtcggcgttgtggccggatatcctggaccccgcaaagaaagttctgacgctgctccatgacgatgatctgtcctcccaaagcaattccttcgaagccaagatcgtcgctgccttaacctggtgccttaggcagtcagtgagcgcagagctggacgggcgaggcaccgtaacgcatacagcaccaacacctgatcagttttggggtcaatgtattggcattgtgacgccgcatcgcgctcagcgcgccttggtggttcgcgaactgcggtcaatattcccatccgatccaccggacttgatcgactcagccgttgataccgtggaaaagttccagggtggtcagcgacacacaatcgtcgtgactttcggtgtcggagatgcagacgtgatcatgggagaggaagcatttctgatgcagctcgagaggacaaacgtggccatctcacgcgcgatggccaagtgcctggtggtcatgccaatgaccctcgcggggcatgtcccacaagacaaaaaggcactcgaaactgcacatgcgataaaagactacgtggacgaattctgcaatcaggaacttgttgatcaaatttcgctggggacaacatcgagacaagcgaagctgcgtttccactactag

SEQ ID NO: 537219 - DNA, 2709 bp, Stenotrophomonas maltophilia
atggcgactaagcgcaccgcgaccaagaacgccgccagcacgaccagcgcttcgctggatttcgccttctttcgttttctgtggcagttctacaaggacaaccggggtgccatccggcagaactacaaggagctgacgcgcaagttcctggacttcaacaacccggagcgcaaccccaaggctttcctgcgccagccgcagttcgaggcgcttgaaacctacgtcttcctgaaggagttcctcggcaacgcgaaggtcgaggagattttcaaggcgtggtacgagcgcaatagcaagtttcagggtcgcaagttcggctccttcctcggcacggccgggcaggagatgttcgagttcggcgaaagcgacgagctggaactgaattcctacaaggtgctgtttgagaagatgcgcaagaactcgcgcgcctacccaaactacatcttcgcgctgacgatgggcacgggcaaaaccatcctaatggcgacctgcatcttctacgagttcctgctgggcaacaaattcgagaaggacgcgcgctactgccacaacgcgctggtgttcgcgccggacaaaacagtgctgcaatcgctgaaggagatcgaagcgttcgacctcacccgcgtggtgccgccggagtacgtcaacttcctgaccacgcacctgcgcttccactaccttgaagaagcgggcacctcgctggatacgctggatcgctcgcgcttcaacatcatcgtctctaacacgcagaagatcatcctcaagcgccagcacaaggaaaagacctccgttgacaagctgttcggcgcgactggcgaaacgctctcggccaccggcgtctatgccgatgccgccgacctctacaacttcgaccagccggaagaggaaggcgaactgaccaccaaccagcgcttcgagaagctgcgccgcctggagcagttgggcatctacgtggacgaggcgcatcacgccttcggcaaggcgctggctaaggatatgggtgtcggcgcgaaggaaaccgacaccagcctgcgcaccaccatcgacatcctcgccgccagcctgaacgcggcgggcacgcgcgtggtggcctgctacaactacacgggcacgccctacgttgggcgcgaggtgttgccggaagtggtgtacgcctacggcctgaaggaggctatcgacaagggcttcctcaaaaaggtgacgctgcacggctacgccaacacccgcaccgacgagtttgtggacatcgccatcgagagcttcctgaaaggatcgggcaacctgcgcccggaaggaatgctgcccaagctggcgtttttcgcggccaccgtggaagagctgactgaagagctgaagcctgccgtcgagcgtgcgctactcaaacacggcatcccgacctcacgcattctggtcaacgtgggcgacagcaagatcaccaccaacgacgacatccgcgagttcaaccgactcgacaccgagggatcggaaaagcagttcatcctgctggtcaacaaggggcgtgagggctggaactgccgctccctgttcggcgtgggcctgttccgcgagcccaagtcgaaggtgtttgtgctgcaagccaccatgcgctgcctgcgcgccatcggcgaggcccagcacaccggccacgttttcctctcggacgacaatctcaacaccctgaacgacgagttgcagcagaacttccgcatcagcgccgacgagctgcaaaagaccggcaaggacaaagagcgcgtggaagtgcgcgttgtcgagccgccggtcaagatcaagctggtgcgcgtgcgcaagcagtaccagatgcgcgagaagcagctggtgcccggccaggccttgggcctcgaccgcgcccacaaggaaacctgggggccgctggtcgagaagtaccggctgatcgaaacgcagcaggacggcctgaccgccgctgacgcggcccgcgcctcgggcagccgcaccttcgatctgaccaaccgccgcgaaaggcgcaccttctcgccgctgacgctggtggccgaagtgtcgcgctacctcaatcgcactccgctggagatcgaggaactgctcgacgccacgaaggaaggcaccaccgagctggtggccatgaccaacgagttcaacgagctgctgtacgacgaaatcatcccgcgcctgttccgccagctctacgacctcgacgagtcgcagcaaaccgaggaacacgaagtcgatctcatcaagctgcccccgaacggctactacgaggtatcggcggcgaaggacaagatcgtccgcatgggcgacacgcagatcaaggacgatgagcgcgccaagagcttccacctcgacacctactgcttcgactccggctcggaaaactggctgttctgggatctgctgcgcgagcagcgcgtgaagaaaatctacttcaccgggatgctgacccacggccagtccgacttcttcatccagtacatcgacccggattcacggacggtgcgcagctactaccccgacttcatcttccagcgcgaggagccggacggcagcctgaagtacgtgatcgtcgaggtgaaggccgacaaccagatcgaggacgcggtggtgcaggccaagaaggacttcgcccaacagatcgcggtggccagcgggatggagtaccggatcatgaagtccacggacgcggacaaacgcaacttccggatgttgctgtaa

SEQ ID NO: 537220 - DNA, 1767 bp, Stenotrophomonas maltophilia
atgagcaagaacacccctgcgcaggacagcctgcaactggtcacgcccgatggcggaaccaccagcgtcgagaagtacgagttcgagccgatcaagggctacccgatgctcaactggcgcggcaagcgtccgttcacgtcgacgcagtattacccggcgcagttgaaggaagttcacggcgaggaattgaatgggtggcgcaacaagatcttctggggcgacaaccttcaggtgatgagccacttgctgaagacataccggggaaaaatcaagctcatctacattgatccgccatttgactcgggtgccgattacaagatgcggatcagcctgcgtggtcaaatggtcaatggtgacagtgcattcttcgaggagaagcagtacaccgacctgtggacgaacgacgagtaccttcagttcatgttcgagcgcctcgttctactcaaggaacttttagcagaagacggcacgctctacctgcactgcgaccccacgcgagggcactacatcaagatccttcttgatgatgtattcgggcagtcaaaatttcggaatgaagttgtatggacgtacagcggcggtgcggttccggacacagacttccctcgaaagcatgacacgctcttcaggtactcaaaaggaacgtcgtggacgttcaataccgtctatcggccgtataacgaactcacggcaaagcggatgcaatccattcacaaaggagtgaaagttgatgtggatcgaggaaccccgataactgattggtggacagacatcaaggttcctacaggtccgaggaatcaagagaaatccggctacccgacccagaagcctttggctcttctggaacggatcattaccgtttcatccaatcctggcgatcttgtgctggacgttttttcgggctctggaacgacacttctcgcagcacaaaaactcggtcgacgattcatcggagcagacatcaatcttgccgccattcaaacgacgacaaaacgtctgttgaatgcagccagccccgcgcagctcgatttggaggacgaggaagctacttcgggcggcgatggttgtggctttgaaattttcaacgtcaaccactacgacatgttccgcaacccagttcaggccaaggatctgctgatcgaggcgctggaaatccagaagctggagttcagtaccgtgttcgacggcgagaaggacgggcgcatggtcaagatcatgcccgtcaaccgcatcgccacccgcgccgatctgaacgagctgattgcaggcttcgactacaaggcgtgggagcgcaagcagaacgaaagcccgaaccgcccggtcgagaagatcaccctcgtctgcatggggcacgagccgaccttgcgggcggaactggaactggcggccaagccctttaagatcgacgtggaagtggtggatatcctgcgcgacaaggccgatctggagttcaagcgcgactcgcaggccaaggtgtccatcaagaagggcgaactggtcatcgagaagttctacccgatgaacctgctgcaaaagctctcgctccagaaggaagcggtcgaggactggaaggagctggccgagtcggtgctgatcgactggaactacgacggcgcggtgctgcaaccggccgtggtggacatccccggcaagaacgagatggttaagggcgcgtacaaggtgccgaacgacgcgggcaccatccgcgtgaagatcaccgacctgctgtcggagtcatgggaagggagcgtggccaatggcgactaa

SEQ ID NO: 537221 - DNA, 2916 bp, Stenotrophomonas maltophilia
atgaccagcgccgcccttcaatccagcgccaacccgcagcaacttgaagccatcctcgccaccgatgggccggtgctcatcatcgccgggcctgggtcgggcaagaccttcacgctggtcgagcggatcgtctatctcatcacccagaaaggtgtcgcgccggagtcgctgtttgtcgtcaccttcaccgacaaggccgcgcgtgagctgaccacgcgcatctccaaccggctgaccgatctgggcatcaagttcaacctgaacgagatgtacctcggcaccttccactccatctgcctgcggctgctggaggactaccgcgaattcacccggctgaagcgcagcttcacgctgttcgaccagttcgaccagcaatactttctgtaccagcgcatcaaggacttccgcgaactgcccgacgcccagctcgtcatgggcgacgaccagacgggtcgctgggcgcagtcggaaaacctgctcaagtggctcaataaggtcagcgaggaggcgcttgacgttgccacgctggccaccgcccccgacgtggaaatccgcgcgctggccgcgtgcttcgccaagtaccaggaactgctgcacgagaacaactcgctcgacttctccggcatccaatacgaggcgctgcaactgctggagaagcgccccgaggtgctggcgcaggtacgcgagaagctgtcctacctgatggtggacgagtaccaggacaccaacaccattcaggaacgcatcctcctgctgctggcgggcgagaagaagaatctctgcgtggtgggcgacgacgaccagggcttgtatcgctttcgcggcgcgaccatccgcaacattctggagttccccgcgctgttcgatgacggccagtgcaagcaggtcaagctgaccgtcaactaccgctcgcacccggacatcatccgcttctacaacgagtggatgaaggagcaagtgtgggacgacggcacgcgcgtcttccgcttcgccaaacagatcgtgccgcgcgaggacgacttccccgatatgcccacggcggttcggctggccgccagcgacgacaagggcgaaaccaccaactggcatgccgaggtgctggccttcctccacagcctgaaggcatccggcaagctgtcggactggaatcaggtggcgttcctgttccgctcggtgaagaacgacaaggtggtggcgctggcgcgtttcctcgaaacgcagggcgtgcccgtgttctcgccccgctcgaacatgttcttcgagcgcgaggaaatccgcctgatgatcggcgcgctgatcttcctgttccctcagttccccaaggtgcgggcgtgggccgaaggcgtgcatctggacatctgggactactacgaccaccagtgcttcaagcccttcaccgacgagctgcgcaagccggaaaacaagcccttgctggattgggcacgtccgctggccaagcgccacgccgtgctcacgcagaacaccgactacgccttctccggcctgttctaccaactgctccagttcccgctgttctcgcgtttcctcaccgaggaggcggcgcaaggcgtggacaagggtcgcgcggcgcgcaacctcggcaccttctccaagctgctcaccaagttcgagtacctgcatttcgtcagcgtattgaacccggaatggttggagaaaaacatccgcgatctgttcaaccagttcctgcgctttcttcaggacggcggcatcggcgagtacgaggacgaatccgagtacgcgcccaagggctgtgtgtcgttcctcaccgtccaccagtcgaaggggctggagtttccggtggtcgtctgcggctcgctggaggcggtgccgcgcaagcagtacggcgaactggacgtactactggaagatggtggctacctctccaaggaacgattcgagccgctcgaccacatcaagaacttcgacttctggcgactgttctacacagccttctcgcgtgcgcagaacctgctggtgctggcagcgcaggagcgtcaaggccgaggcctgggcaagtcgccgtcgaagtatttcgagcgtctgttctacgaggtgccgagctggcgcgacgtcgatctgtcggcgctgacctatgaggccgtcaagcagatcaacctcaagcgcgaatattcgttcacctcggacatcaccgtgttcgagaattgcgccgagcagtaccgcttcttcaaggagctggagttcgccgccatccgcgaaagcccgatgctgttcggtaccttggtgcatcaaaccatcgaggacatccacaagaccgtgctgcgcggcgaagaaggcaccatcaccttcgacggcatcaagagctggttcgcggccaactacgccctgctgtcgaagaaggaacgcgtgtacctcgcacccagctcgcagcaggcggccctgctgcacgtgctgcgctactacgagcgcgagaacggcaattgggatcgcatcaaggaagccgaggtcgagatttcgctggtcaaggatcagtacattctgaagggcagcgttgacctgattcgcggcgagcagggcacggtcgagatcatcgatttcaagtcggagaagaagcccgacatggagaaggatcgggagcggctgcgccagtaccagagccagttggaggtgtacgcccatctggtcgaggagcgcaccggccagaaggtcagtcgaatgcatctgtactacaccggcgaagacggcgggaacccctacatctccttcagcaaggacgaacgcgccatcggcaaaacgatcgcgcgcttcgacgacatcgtggcccgcatcgagcggcaggactatggcattgcgacacgcccggccaagctgtgccagagctgtgacatgcgcgcctactgcgacaacaagaactggaaattcaggaagagcaactga

SEQ ID NO: 537222 - DNA, 213 bp, Stenotrophomonas maltophilia
atgagcgaccagccggacgaaatcctcacgattgacgaggttgccgcctacctgaaggcaggcaagcgcacggtctatcgccttgcggcgagcggcaagctcccggccttcaagctcggcggcacgtggcgcttccggcgcggtgatctggacaagtggatcgccagccgcatcggcaaggcgatggccaatgacgacgagggagcggaatga

SEQ ID NO: 537223 - DNA, 3321 bp, Stenotrophomonas maltophilia
gtgggatcgaactatgaggcgatttgcgaggagaaccgggagagctacggcaccaagggcgcacagaagtccggcaagctggccgccggcctgtacgacgaccgcacgcacttcatcttcgagttgctgcagaacgccgaggatgccctcggtcggcgcggcgagtggaagggatcacgcaaggttgcgttcaccctgaacccggcctgcctgacgctttcgcatttcggcaagccattcgacgaggccgacgttcgaagcgtctgtgacatcgccgagagcaccaagaacgaggcgtccatcggacgtttcggcctcggcttcaagtccgtctacaccgtcaccgatcttccggagattcactccggcgacgaggacttcgccatcgagaactacgtcttcccgaaacggatggcgcgttcggcgcgcgcggctgacgagacgcagatcgttctgcccctgaaatcggaggacgtgagcgcagcgcaggacatcacggctggattccgccacttggggcccggtgcgctgctgttcttgcggaacatcgaagagatcaactggagcgtcgaaggtggcgcgtcagggttctacctgcgcaacgctcccgagtctcttggcgacaacgtccatcgcgtaaccgtgattggccaagaaaccggcaaagccgaagtcgatcagaattggctggtgttccaccgcgacgtgttttctgccgaggggcagaagatcggacgggtagaaatctccttctcgctgcttgcggtgaaggacgccccagaccgctgggctgtgcagccgctggccaagtcgccgctggtggtgttcttcccgacggtggtagagagccaccttggcttcctcgtgcaggggccgtaccgtaccacgccaagccgcgacaacatcccgcccggcgatccgtggaatcagcatctggtcaaggaaacgtccggcctgctggtagaggcgatgcgctggatgcgagacaaggcgatgctggatgtcgctgcgctgcgctgcctgccgcttgaccacgagaagttcccgaaagattcgcggttcgcgccgatgttcgatgccgtccggcaagcgtttcaggacgaggagctgcttccgacgttcgatgacggtcatgtcactgcccaacaggccaagctggcgcgaacgcaagagttgcgcgagttgttcagcccggaacaggtggcggcgctgttcggttcggaggtcgctgcttggctgtccggcgacatcactcaggacaaggctcccgagatccgccagtacttgatgcgcgaactcgacatcgacgagattacgccgacaaagctggtgccgagcctgaccaagcccttccttgaggcgcagtccgacgagtgggtgttgcggctgtacgaattcctgagcggccaggagaaggcgctgcgtcgtcacctggacaccgttccgctcatccgccttgatgacggtacgcacgtcgtcgctcgcgagaacggaaaggccaaggccttcctgcccagcaccatcgccaccagttttccgacgatgcgccgcgcggtgtgcgcgacacccgaggtgcgtttgttcctgctttcgctgggcatcaccgaacctgacccggtggacgatgttgtctggaacctcttgccgaagtaccagcagcaagaggtggatgtgggcgacgatgcctacgcggccgacatcgagcgcatccgggcagccttcagcaccgactcaacggcgcagaaggaaaagctccggtcagccctgcgcgacaccacctttgtgatggtggtcgacactggcgatggcaaaggctacgttgccaagcccggcgagatctacatcgccacggatcgtctgcagcagctcttcgccggtgtgcccgacatcttgatcgtggacaacgaatacgactgcctgcgcggcgagagcatgcgcgagctactggaagcatgtggtgcgttgcgatatccacgtcccgtggacgcgccgaatgcgctctcgcgggacgagcgccgcgagctgcggcggcaaacgggccacgcagagacgtctggcatcaacgaccgggttgtcgattggctgctgcacggcttcgatgccttgatcgaactgctgcccaagctctcttccgaacagcgtgccgaacgcgcccgtctgatctgggaaagcctgggcgatctggaggaacgtcgcgggcgcggcatcttcgacggcgcatacacatggacgcatcacggcgaacgcaggacgccgccattcccggcagccttcctgcgccgtctcaacaaagcggcttgggtgcctgacgcgactggcgagctggtaccgccgggccttgtggtgttcgacacgctcggctggaaacccaatcctttcttgctgaccaagatcgcgttcaagccgccgatcatcgaccaactggccaaagaagcaggcatcgacccagcagccctcgatttgcttcgaaagctcggcatcaccagcgtcgacgacctaacgtcccggctgggtatcaccaccccacccgaggtcgatcccgtacccagcacgatgcccgacgaggagccggaaaccgcaggtcaacccagcggagatgtctatgacgacgcgcacgatctgtacggagacgacatgccggacattcttcccggcacacctgacccggatggcggcgacggcgcgacaggtggcgcagggcgcggcggtcaggcggggactggcacgggaacgccacacggtggcggtcagggcaacggcgggacatatggtggctcaggcggcggccattccggtggaggtggcaagggcggtggcaccagcggcggagggcaaggaaagcggtcgcccggctcggctggcggacgaccgttcatttcctaccttggcgctcatcctgatgacgaggaatccgatccggatggcctcgatcaggcagcacggatgaagatcgaggatcaggccatcgccctgatcatctcgctcgaacctggactgaagcgaacgcccgagggcaaccccggtttcgacctcttcgaggtcaacggcagcggccagcgagttcgatgggtcgaggtcaaatcgatgacgggcactctggaaaaccggcccgtagggttgtcacacacgcaattcgactacgcccgcgcgaagggagatgcgttctggctgtatgtggtcgagcacgcgaccgacctcgaaaaggcgcgggtgctccggattcagaatcccgtggcacacgcgcggacgtttacgttcgaccacggctggagccagatcgcccgaaccgagccgccaacttcgtctgaaccgaaagcttga

SEQ ID NO: 537224 - DNA, 690 bp, Stenotrophomonas maltophilia
atgtccaccctcaaatccatgaccgggactgcgctggaacattcggcgctcaaacagcgccatcgactggtgcgcgacggacatccgaccagcctgacattacgaatccatcgagccttgagctggctgaatcgcgccgagcaggcggaagacgtggacggcaaattcatcttcctgtggatcgccttcaatgccgcctacgcacaggaactcgacgacagcgaccgcacctccgacaaggccaccttcacggctttcctccagaagctctgcgacctcgataccggcaagcgcatcgacgacctgatctggaaggaattctccggcagcattcgtaccttgctcgacaacccctacgttttccacctgttttgggagttccagcgtggccggatcgatgagggcgaatggaaggatcggttcgccagcgcgaagaggtcggcgcagatcgcgctggccagcggcaacacgcccgtgttgctctcggtgatgttcaaccgcctttacacgctgcgcaatcaactcatccacggcggtgcgacatgggacggcaaggtcaaccgcgaccagttgcgggattgcacccggctgttgggcaagctcgtcccagtgatcattgcggtaatgatggacaaccccaatgcgctgtggggcgaggccgtctatcccgtcgtcgatcaggacgcctga

SEQ ID NO: 537225 - DNA, 1365 bp, Stenotrophomonas maltophilia
atgcgccggatcgtcgatgacaccacctcatctcacggagcatcaccgcaggacgccaccgatgacgaggacggtgcaaccgtggtgggccatcgcaatgccccggatgccgatcctgcctgcctctatggcctgatcggagacgtggcccgcgcgggcagcgatggcacggagaccaacgcctgcgccatcgccgccaacttcatggcctacctgtcctgtgcggtcgggcgcggcgtgtacctgcccatcggcaacacccggcaccacgcccgcctgttctgcctgcacatcgggcgctcgggccgtggccgcaagggtgatgcggtgtcgctggtgttgcgcatcgatcagacgctgcgggcgatggacgacgccttcgcgccgcagattcaccgtggcggcctgtccacgcgcgaaggactggtggcgctgatgcacgacggctaccggcaaggtcggcaggacgtgcccgccatcgaggacaagcgcctctgggtggtcgaatcggaattcgccaacgtgctgcatcagggacggcgcgacggcaatacgctgtcggcagcgctgcgcgactgttgggatggcgtcgatctcaagcccgccaccaagtcgaaccggctctacgccagcgatccgcatgtctgtctgagcggcgcgatctcgcccagcgaattgaccggcctgatgagcacccgcgaactcaccaacggcttcgccaaccgattcctgatgatctgggccgagcgcacgcggatgctgccgttcccgaaggaaacgccgcaggccgtggtcgagcatttggcgcgcagaaccctggaagtgctggccttcgttcgcgccgaccggcacggcgagcgcgagcacctgcggatggaactgtcggcgcaggcgcagtggcgctacgcccaactctaccggggcgagctgaacgacgatctcggcgacggcacggtcggtgcgctgctggaacgccgcgctccaatgctcttgcggttggcgatgttggtggcgctggccgacctgcaaacccgcattgatgtcccgcacatcgacgcggcgatggcgtggattcggcacgccacggcctccgtccgcttcgtgttcgtcagcgccgccgatgaagcgaagctggcgcaagtgcgggaactgtcgaaccgcgtgctggctttcctgcgcgagcgcgatcaggccacgcgcagccagatcagcgctgaatgcttccgtggcaaggtgccgaaggcgcggatcgacgcctgtctggagcacctgctggcttgcacgccgcccaagatcagcgtgcaaacggtcgaacgccccaccgatgcgccgggtacgccgacgcgcgtataccggcttgcgtag

SEQ ID NO: 537226 - DNA, 885 bp, Stenotrophomonas maltophilia
atgagtcagccacccctgggctttatccccgaaccgatcacgctggccttggatcggattctgccgtcgcgcaaaccgccggagggtttgcaaacctcgcgcaagttcaagcagatcatggcgtcgatggaggctgttgggttgatcgaacccttgagcgtaggcaaggccgacaagtccactggacaacacatcttgctcgacggccacatccggctgttggccttgcagcagctcggctacaccgacgcgccgtgcctgatcgctaccgatgacgaaagctacacctacaacaaccggatcaaccgcatcacgtccattcaggagcaccagatgctccggcgtgcggtcgagcgcggcgtcacgcccgaccggctggccaaggcattgaacgtggacgtcagccagatccacaagaaggtgagcctgctcgaaggcatctgtccggaagccgtcgagatgctcaaggatcagcatttttccgccaacctcggcgcggttctgcgcaagatgaagcccacgcggcaggtcgaatgcgtggaactgatgctcacggccaacaacatgaccgtcgcctacgccgaagccttgctggccgcgacaccaccggctctgctggtcagcgaaaagcggccccgcaagctctccggcgtcacggcggaacagatggtcaagatggagcgcgaaatgggaaacatccagaatcaactgaagctggtcgagaaatcctacggccaggacgtgctgctcctggtgctggcgcgcggctacctcggcaagctggtcggcaacaaagccgtgcttcgctatctgtcgcaacgccagcccgacgtgctgaccgagtttgaaaacatcgtccagaccgtggcgctggacggcaaatga

SEQ ID NO: 537227 - DNA, 900 bp, Stenotrophomonas maltophilia
atgatgaagaaacaccacgccaccgacttgcagatgatcccggtcgaccagatcgccgtgctcaacccgcgcgaccgcaatggccgggtgttcgaggagatcgtcggcaacatcaagagcatcggtctgaaaaaaccggtcacggtcaccccacgcgacgatctggaggacggcaaacgcttcctgctgatctgcggtgaaggcaggctcaaggcgttccggtcgctcggcgagaaacagattccggcgttggtcgtcgcggtgaacgacgaggacgccttcatcatgagcctgaccgagaacatcgcccgccgcaaatacagcgcgctggagctgctggtgagcatcaaggacttgagtgaacaaggctacgacaagcgcgtcatcgcccaaaaaatcggcctgagcctcgattacatcaagggtattctgctcctcttcgagaaaggtgaagaacgtcttctggctgccgtggagtccgggcgggtgccgctcaacgtcgccatcaccatcgcgggcgcgagtgacgaggaagccgtgcagaccgcactgcaagaagcctacgaaagcggccagttacgcggcgggcaactgatgcagacgcggcgcgtgcttcagcgacgcaataccttgggcaagacgctgaaacatcggcctgcgcgcaaaggcgcggcagtcaccaccaccagcctggtgcgcaactaccagaacgaggtcgagcgccagaagctgaccatcaagaaagccgagttcacgcagcaacgtctgctgttcgtagttgaggcacttcgccagttgctggccgacgagcatttttccaatctgctgcgtgccgaagggctggacaccttgcccaagcaactggccgagcgtatctggggtggaggtcacgcggcatga

SEQ ID NO: 537228 - DNA, 1566 bp, Stenotrophomonas maltophilia
atgcaactgcaagaaccgtcttcggataaaccggaatcaccccctgcattccgcgccgcgcagtacgtgcgcatgtccaccgagcaccagcaatactcgacagagaaccagggcgacaagatccgcgagtacgccgcccggcgcaacatcgagatcgtccgcacctacgccgacgagggcaagagcggtctgcgcatcgatggcaggcaggctctccagcaactgatcgctgatgtgcaggcgggcaaggctgacttccagatcatcctcgcctacgacgtcagccgctggggccggttccaggacgccgacgagagcgcctattacgaatacatctgtcgccgcgccgggattcaggtggcctattgcgccgagcagttcgagaacgacggctcgcccgtgtccaccatcgtcaagggcgtcaagcgcgcgatggcgggtgaatacagccgcgaactttccgcgaaggtgttcgcgggccagtgccgcctgatcgaactcggttttcggcaaggcgggccagcaggctacggcctgcggcgcgtgctgatcgaccagtccggttcggtgaaagggcagctttcgcgcggggagcacaagagtctgcaaaccgaccgcgtgatcctgcaacccggcccggacgcggaggtcgcggtcgtgaaccagatctaccgctggttcgtcgaaggcaacctgttcgaatccgagatcgctgaccggctcaacgccaagggcattcagaccgacctcgggcgcgactggacgcgggccaccgtgcgcgaagtcctctcgaacgagaaatacatcggcaacaacgtctacaaccgccgctccttcaagctcaagaaggtgcgtgtggtgaaccagccggaaatgtggatcaagaaggaaggcgcattcgagggcatcgtgccgcccgacctgttctacacggcgcagggcatcctgcgcgcgcgggcacatcgctacaccgatgaggaactggtcgagaagctgcgccgactgttccagcaacacggctacctctccggcctgatcatcaacgaggccgagggaatgccttcggcagcggcctacgcgcaccgcttcggcagcctgatccgcgcctaccagacagtgggcttcacgccggatcgggactaccagtatctggaggtcaatcagttcctgcgccgcctgcacccggaaatcgtcggccagacggagaagatgatcaccgaggtcggcggcacggtcgtgcgcgatccggcgaccgacctgcttaccgtcaaccgtgagttcacggtgtcgttggtgctgtcccgctgcaacgtgctcgatgacggtcgccgccgctggaaggtgcgtttcgacaccagtctgacgccagacatcaccgtggccgtgcggctggacgaaaccaatcaggccgcgctggactactacctgctgccacgcctggacttcggtcagccccgcatccatctggccgagcacaacagcatcgagttcgagagttaccgcttcgacagcctggactacctctatggcatggccgagcgcagccgtttgaggagagttgcatga

SEQ ID NO: 537229 - DNA, 435 bp, Stenotrophomonas maltophilia
atgccccgaaattgcgcgcactgcggccaagcctttcagccccgcccccaagtcccgaaccagagttactgctcatccgccgaatgccaacgcgctcgcaaactgcgctggcagcaggacaagctccgcaccgacccagactaccgcgacaaccagcgtgacgcccagcgcgcgtggttcgaccggcatcccggctactggcgcgcctatcgtgccgccaatcccgatgcgatggaaggtggccagaacggaagcgccaatggtgtggacaacggtcttgcaaaaatggacgtgtcaattctgccgtccggcctgtaccggctgcggcgaattcccgcgcctttcccagaggaaggcgatgcatggctggtcgagatcacgcccgtgagcatcgactgcgtctgcaaaaaggacgtgtgcaaagagatgacttga

SEQ ID NO: 537230 - DNA, 1065 bp, Stenotrophomonas maltophilia
atgttccgaaccgacaccctccagatcacctcggaggtcttgggcctggtcgcccggatcgacgaattcaaaggtgcatggcgcgccttgggcacgcttgcgcccgaccgcctgtcggcgttgcggcgcgtggccaccatcgagagcatcggctcatccactcgcattgaaggcagcaagctctccgaccgggaggtcgagcggctgctgtccaacctcgccatcaagaagttcgactcacgggatgaacaggaggtcgctggatacgccgagctgatggacttgatcttccgggcatgggaggacatctccttcaccgagaaccacgtcaagcagctgcatcagattctgttgcagtacagccagaaggatgagtggcaccgaggcggctacaagaccaactcgaacagcgtcgcggcctttgatgagaacggccagcagatcggcatcgtcttcgagacagccacgccattcgacacaccgcgcctgatggcggaactggtgcagtggaccaatgatgagcgcggcaattccgacaaaagcggggccgcgctgcatcctttgctcatcatcggcatcttcgtggtcgtgttcctcgaaatccacccgttccaggatggcaacgggcgtttgagccgcgtgctgacgaccctgttgctgctgcaagcgggctacgcctacgttccgtacagctcgctggaaagtgtgatcgaggccagtaaggaaggctactacctcgcgttgcggcagacgcagggcacgatccgctccgatgccccgaactggcagccgtggttgctgttcttcctgcgctctctggccgagcaggttcggcgtctggagaagaaggtcgagcgtgaaaagatcgtgctggccgcgctgcccgatctgtcactgcaaatcgtggagttcgcccgggagcatgggcgcgtcacgatggctgaggcgatcaagttgaccggagccagccggaacaccctgaaacagcacttccgcgacctgaccgaacgcaaccatctggagcagcacggcagcgggcgtggcgtgtggtatggattgaagtga

SEQ ID NO: 537231 - DNA, 246 bp, Stenotrophomonas maltophilia
gtggtgatcgatcggtcgtccgatgtctgggcttgggagtggagcaaccagagcgaggtgttcggtgactggatcccgagtgctgatccgcaagacgatggagtggtgtttgaactcggcctgcgccttcccggccagcaggtgactcgcgcgagtggctcgatcaaaacatcgaggacgactctgccgctgactccgctgcggatcagccggcaaatcgcctcggacgatcatctggacaaatga

SEQ ID NO: 537232 - DNA, 321 bp, Stenotrophomonas maltophilia
atgcgatgcgtcctcgcccttggtgtcgtgctgctggccgcttgcggcaagcagccaaccgaccaccatgccgatgccctggccgccgatcccgtgcgactcaagacattgcgcgcgcaatgcgcggccgaccggcaggccacgggcgaggacgcttgccgcgccgtcgccgaagccttccggcggcgcttcttctccggcctggctgggccggatgaataccagaccttggccgacctgccgccgatcccaccgagcttcgatgagccggccgatggcgtggcaccggcactgccccccgaaccggaggccatgccatga

SEQ ID NO: 537233 - DNA, 270 bp, Stenotrophomonas maltophilia
gtggaggctacgttctggatcgcggagaagccgtcgaagcttcgtgcgatgaagaacaagcgtgatcgcaaatacgccgaacgctgggagcacttcaaggccagcctgcgggcgaaggtggagcatccgttccgagtggtgaagcggcagttcggttacaccaaggtgcgctatcgcgggttggcgaagaacacggcgcaggtgttgacgctgttcgcgctgtcgaatctgtggatggcgcggcgacgtctgttgctgccgacgggttaa

SEQ ID NO: 537234 - DNA, 1434 bp, Stenotrophomonas maltophilia
atgcgcctgatgatgacctcgcgccataagccacggcgaagccgtcccgcgtcgcttgcattgagggtcacggccctggttggcattgccactaccttggtatttctagcgttcaactgggttgtcgttagatccctggagcaccactttgcccaacaggacgcccatgaactggacgcagtggtcacggccttggcagagccgttgcgacagatcgctaatgacatggacaaagatgagttgcggcagcatttagccaatgcagtggcaggacatcatgggatgacctatggtgtctatgatcggccgggcaataccatctatgccacgccgggtcctgacctgtcgaaacttgccagcagcaaaaagttggtcaaccgcatcaccgccgacgatttgacggtgtggcaagagaatcagaggtcttatcgaggtgtggcgctacaactgcctgccgacgattcggcggcacctggctaccgcatcgtcgctgccatggacatcggctttcatctcgatttcttggcagagttcaagcgcatgctctggtgggcgacctgccttgttctctgcattgcgctcggggtggcttggctggccgtgcaatggggccaccttccaatccgcaaggtcaacgaggagattcgcacgatccgctcttcaaagctagatgtgagacttgatcctctggacgtacctatagaactggctgaacttgtggtcgccttcaacgacatgctggccagaatcgaggaagggtttgtccgcctgtcgcacttttccgccgacattgcgcacgagttgcgtacacccgttaccaacctgattacgcagtcccatgtggcgctcgggcaaccccgcagtgcagaggaatatcgggagatcctctactccaacttggaggagtttgatcgcatgagtcgcatgatcggcgacatgttgtttctagctcaaacggaaaatgaccctcgaaatctccgcctcggcgaaatcgacttggctgagttgatccgaggtttgtttgactacttcgaggcattagctgaagaccgcaacatcacactttacgcaaagggtgctgccgaaccaatacgggcggatcgtgagatgttgctgcgggcgctcaacaatcttctttccaacgcaatccgtcatactccctatgggtcgcgtattacagtcgctttggcgcaagatgagcgatggacaacgataagtgtcgaaaatccgggcgagcgaatttcggaggctgatctgccgaagttattcgatcgctttttccgagtagatcctgcccgccaacgaaagaacgcaggtgcagggctagggctggccatcgtcaaatcaattgccgaagctcatggtggacatgtgcaggcaacgtccagcgatacagcgactaaatttgatctaacgctgcctcgcatcgcttag

SEQ ID NO: 537235 - DNA, 507 bp, Stenotrophomonas maltophilia
atgtcgcaactgaccctctctctcgatacaccgctgatggtgcgcgatggccgtgggcgctatcggctggcagacgccgaccagattctggaagccgcgcgccaggtcatcgaacagaagatgcagcgtggtgccgagttcacttcgccggtggtggtcaaggactacctgcgcgccaagctggccggcttcgagcacgaagtcttcgcggtgctgttcctcgacacgcgccatcggctgatcgactacgtggagatgttccacggcacgatcgacgccgccgaggtacatccgcgcgaggtggtcaagctggcgctgcggctcaatgcagcggcggtcatcgtgtcgcacaaccatccgagcgggaatcccgagccgagcgcggccgacaaggcgatgaccgcgcagcttcggcaggcgctggcgctggtggacgttcgcacgctggatcacatcatcgtcgccgggagccgtaccacatcattcgccgaacacggcctgatttga

SEQ ID NO: 537236 - DNA, 1308 bp, Stenotrophomonas maltophilia
atgaaagcggccatgaacctcgccgaacagctcaatctttcctgtgcatgtcgcacgctcgatgcaacacggctgcaccaaagcctgcccacgtcgctggccgacagccatccccacttgttttcggaaacggcggtgttcatcgacatgccaacccgcaacgccatcgcccaggccgtggcgacgctggagcgtgtcacctgcctgccgggctatcggcaggcggtggtggaacgcgcgcacggcacggacacgctggcgccggacttcggcccatctggcgtgttcatggggtacgacttccacctgggagcggacggcccgcgtctcatcgagatcaacaccaatgcgggcggcgcgctgcttagtgccgcgctggccggggcgcagaacacctgctgcgcggcgatggagcagtggctgggccgtgccaacctcacgcaagccttcatcgacatgttccgcgccgaatggcgggcacagcggggtgtgcagtcctggcgcacggcggtcgtggtcgatgacgatccgcagcagcagtacctcgcccccgagttcgagcttgtccggcggctgttcgagcatcatggcgtccgggctatcgtggccgacccgcgcgaactccaatggcgcgacggtgccttgtggcacccggcgcttcccgccgatttgccaatcgacatggtttacaaccggctcaccgacttcgacttgtcggagtcttcgcatgcggcgctgcgcagcgcctatcaggtgggcgcggtggtgctgacgccgcacccacgagcgcacgctatgcacgcagacaagcgcaatctgatctggctgggggatgacgtacagatggcccgctggggtgccggcgaggccgaccgtgccgtgctgcgcgcggtggttcccgccgcccaagctgtcctgccggccaatgcggaagtcctctggcgcgagcggcgtcaatggttcttcaagccgatggcgggctacgggggcaaggccgcctatcggggcgacaagctgacgcgcaagacatgggagcacatcactgccggcggcttcgtcgcccaggcgctggtgccgcccagcgagcgcatggtcacagtcgatgatgtgccgatgcggctcaaagtggacatgcgggcctatgcctatcggggacgtgtcctgctgctggcggcacgcacctatgccggccagaccaccaacttgcggacgcccggcggcgggttcgcgcccgtgctggttttgccatttggtgatgcggcgcaagcgaacgattcttccatcacggttcagaagatgctggcatga

SEQ ID NO: 537237 - DNA, 831 bp, Stenotrophomonas maltophilia
atgagtgacatcacgatctaccacaacccggattgcggcacgtcgcgcaatacgctggcgctgatccgcgccagcggcatcgcgcccacggtcatcgagtatctgaagacgccgcccgaccgcgaaaccctaaaggcgctgatcgcacggatgggcatgcacgtgcgggacgtgctgcgcgtcaagggcacgccttacaaggaactcgggctggatgccgtccattggagcgacgacgaattgatcgaccagatgctggcgcacccgatcctcatcaatcgacccatcgtggtttcgcccctgggcgtgcgcctgtgccgcccctcggacatggtgatcgaactgctgccacagcggccggcgggcgagattcgcaaggaagacggtacgccgctgctggtggatacgccgatcgcgggcagtgacacgggcctcatcacggctttgcaggaggccggactgccctcggacgatctgaccgagccggggcgcagcttcttcgcctattccacggtgacaggcgagcgcgtgggctatggcggcttcgagcgcatgggccgggatgtgctggtgcgctccttggtcgtgctaccgaacgcacgccagcgcggcattggaggcggcatcgtcgcgctgctgctacgccgtgccttcgacgaaggcgggcgcgacgcctggctgctgaccacgacggcagcgccgttcttcgagcgcgcgggcttcaagccggtggagcgcacaagcgcacctgcttcggtgctggcgacgcggcaggctgcgagcttgtgtcctgccagcgcagcgttgcttaggcggccgatttatctgtag

SEQ ID NO: 537238 - DNA, 204 bp, Stenotrophomonas maltophilia
gtgatccagctgcgtggcgcgcccgaacagggccagctgatcgtcgacccggacggcccgcatcgctgccgcctggaatacaccaccccggatgcccccgacgcctatgggctgtcgtggagccaggcggtgtgcacgccgatgccggccccgagtaatgggctgcaggccgccctggatgcggtcgaagccacgtcgttctga

SEQ ID NO: 537239 - DNA, 432 bp, Stenotrophomonas maltophilia
ttgtcgctcagcgcgctcctgcaggaggcccgcgtcgagcatcgcgtgctggaggccgaaaccgtgggcgccagctggcggcggcgctgggattcgttccagaccaacaccgccaacgcgacgatggccctgcatggccatgcctatgccggggatgacccggaagggttcatgggggccccggaagtgatccgacggctgcgcgactatgccgacgagcgcgcgttgccgatcagcgaggggtgcgtggtccatcgggtcgggccggagtccggtggctatgccatcgacagcagccgggggctgatccatgcccaggcggtggtggtcgccaccggtgaataccgccgggcgcggttgccccgggcccctttcgcgcccgcaacaggcctcaccgtgctgcactccagcgactaccgcagtcccggctag

SEQ ID NO: 537240 - DNA, 1221 bp, Stenotrophomonas maltophilia
atgaccgttcgcgatactcttgtcgaccagcttgctatcgacctaatcggcccactagccaacgacgaaatcatcgatgccagaccatcggacgtctatctcactggtattctctggcctcagaacactgttctaccaccggagcaggacgagcgccttgcagtcgcaggcggagatggagacagtaatgaagagactgacgcggcctcccagcccgcggcgtcccggatgcggcgcccttcaactgccggattatcattcgcttgcgcgtcggatagcgcggacgcgccaagggttgtcgttgaagttgcatgtgctcgctatcagccgcatccaaatgagacaaaccgatgggttcgcacgccatgccatgtgccacttcaagacattgtcctgactccaggcagcgatgacttcccagtacccattgccggcatcgatggtgtccgcctgaatgtgagggttatagcatttgaggctggagtgctggctacgatcacattggtaaatggctccttgcctgagcgaagcagggacgcaatcgagattgcaacgttgttccaaacaggcttgactgttcgggctgctgcggggtctcgcctcatcacacgcccaagccggaaagcggcgatcgacgctgacgatcgctccaatgctcttctatttcgtcattcgcgcgagtacgccaccggccacacgtgctccgctcgatggagtattgatgccgaggggcaagagatcgatgcagtacaaacaacctggatgcctcaggccacaacaaaagcagtgagtcccgacggggcacaccactttgccaagctcgctgattccggctcccttgcggcagcaacgctggctgacagtaccgatgatgaattgatcaagcatcttggcagcatatgtgatgcatatgccgattggttggaagatcagcgcatgacactggagagcattccggaccgcctcttggaaacagcaaactcgcatatcgccgagattcacctagcgcttgagcgaatgcgccgaggcgtgaataggctagccactgatcacgcaatggctgaagcgttccgtcttgccaatctcgcgatggaaacccagcgagtctggagcggatcctccttgatctggcgcccgttccagctcggctttctacttctttcgatggaatcaacactagactcccagcatccggaccgcagcgtaatggacctactttag

SEQ ID NO: 537241 - DNA, 294 bp, Stenotrophomonas maltophilia
atgctgaactctgaacgcctatccgggcgtgccacccggttgcttgcaggactgcttctgcttggcccctgtctatgggcaagcgctcaggcgcagccccagcccgccgcacgcaaggtgcccagtggtgccgaactgattgccggcgatgcacgctttctgagccgtgcgtatgcgccctgcatggcggctgcgggcaccgcactggaggcccgtcgtcgttgtgtcgacgctgaattcaaggtgcacgacgatgcgttcaacgccgcctacagtgcggcggctccacgctga

SEQ ID NO: 537242 - DNA, 768 bp, Stenotrophomonas maltophilia
atgaccatttccgccaacgaccgccgcaagacctacgtggggaacggcgtcgctaccgcgttccccgggccgcgcgcattcctggcctcgcatatccaggtgttcaccggcacgcatccggtatacagcctggtgccgccatcgcagtacacggtgaccggactgcgggcgaacaccagcacggtcaccttcaatgccgcgccggccctgaacctggacatcctgatcctgcgcacggtgccgatggaccagccggccgacataaccaaccagggtgcgtttctgccggagatccacgaagacgccttcgactaccgtgtgatgcagctgcagcagctgctcgatagcggcatgcagctgatacaggacccggagagcggtgagttcgtgtgggacgccaaaggcagccgcatcatcagggtgggcgatgcgaagggcgatgccgatgcggtgaactttcgcaccgtcctggtgctgatcgagcagatccagaatggcggtggatcagtcggcattgcaccgaagttctggtcgttcgagggcgacggcgaggtaactgatttcccgctggccggcgctgacgtgctggacgccctgttctacgacactgcgctggagaagacggccggggctggagactacctggtatcgaagcccggcgacttccagattctgcctggtggcgagggtgtggctccggcaattcgtttcacgactgcgccagccgatgggcagcgaggctttcggtggtgctgccctatggggtag

SEQ ID NO: 537243 - DNA, 414 bp, Stenotrophomonas maltophilia
atgcccggactgtccttccagtcccgggttgtcggtgtgggccacaaaccagagccggtcccggcgatggggcgcgtcgacggcacaagctgggacaacgaccgcccggcaggcgtagtcctctgcttccaggtcaacagacactccgtcgagccagttcttgccaaccgccgccgcaacctgttctcccatgacgacagcgggccgtcgggcacggatgaggcgaaggaagtggggccacaggtgccgatcgtcatcctgggcttttcctttacccgcgacggagaacggctggcacggggcgctgccggtccagagttcgcggtcgtcgggccacccagcaagtcgagctgcaagggaccatcccgcaattccgcagaagaagtggcattgccgatatccggcaaggtctga

SEQ ID NO: 537244 - DNA, 981 bp, Stenotrophomonas maltophilia
gtgcgcgtgcagttcctgcgcggcggcagcctgggcgccgtggaggagcagttcgccagccgcctgcgccgtggcgaccgcttccagttcgccgggcgcctgctggagcttgtgcagctgcgcgacatgaccgccttcgtgcggttggcacgagggcgcggagacggtgtcgtgccacgctggcagggaggccagttgccgctgtcgatgccactcggacgcgagctggagtgggtactgtccggtgctgacgacagcgccgaatcacgctggctgtcgcccttgctggcactgcagcaacagttgtcggcgcttcccggcccggaccacctgctggtggaagaggtgcggcgtcgcgaaggccagttcctgttcgtctatccctttgccggccgccacgtgcatgaggcgctggccgccctgctggcgctgcgctgtacccgccggcagcgcaacagcatcggctatgcggtgaacgatcacggcctggtgctggcaccggcacaggccatcgatctggacgcggcgcaatggcgggcgctgttcgcctccgatcagctgctggatgacctgcgtgctgcggtgaaccttggcgagctggcgcgtcgccagttccgcggcatcgcacgcgtcgccggcctgctggtccccagcctgcccggtggcatgccacgggcactgcgccagctgcaggcgtccgcgggactgctctacgacgtactgcgcgagcacgacccggatcacctgctgctggcgctggcggaacaggaagtgctgaatgacagcctcgacatgccggggctgcaacaggtactggccaggattcggatgcagaccctctcggtgcagcgcccggcgtcactgacgccgttgggtttcccgctgtgggccgaacgcctgcgcgggcagttcagcaacgaagactggcgtacccgggtgcaacgcgtggcccagcagctggagcgtcggcatggccgatga

SEQ ID NO: 537245 - DNA, 138 bp, Stenotrophomonas maltophilia
atgagtagcaagcagaacggtcggaagcacgacaagcgtcagcagttggtcggttacctcaagcgttttctgaggaagccttggttcatgcgtttggtgattggggtgatctggaagttgatggatcgctatctctga

SEQ ID NO: 537246 - DNA, 246 bp, Stenotrophomonas maltophilia
gtgagtgagagcctgagcgtggccgaggtcgtccagcgcgccgcccagatcgacgcaatgctggacgcgatcaagggcactgcgcccgatgccgtccaggcgatgggggggcgcgatgccctggcccggcgcagcgagatgacctgcatcggtccggtgccgcgcctagacgcgggcgagtgggagctcatgtcgcttgagtatgagaaccggcgcgagcatggcagcgtcaaccggggccactaa

SEQ ID NO: 537247 - DNA, 1074 bp, Stenotrophomonas maltophilia
atgaaaaagcaggccagaatgctgctggacaagggaatagactccttggtgctggcggtcgagcacttcaaccggccttgggaccggggcaggaaggaggccgtcctaatcctcctcgatcggagcttcgagctgatcctcaaggcagccattattcacaggggcggcaagatcagggaggcctacgagcgggagacgattggtttcgagaagtgcgtgcgcaagtgccttgacgacgccaaccttaagtttcttagcgtggacgagggactgaccgtccagatcatcaacagtctccgcgacgctgctcaacacgacgtggtcgagctctccgaacaggagttgtacctgcacgcacaggcaggtgtaactctattccgcgacatcctcagcagagttttcgccgagaaactcagcgaccacgttccggagcgagttttgcccgtttcgcccaaccccccgcccgacctgcacacgatgatcgaggccgacttcgagaaaattatccagcagctccaacgctactcacgcgaccaagtcgaggcgaaggcgaagctcaaagctctcgccatcgttgagtcctcgctctccggcgtacgctcacaaccgagcgagctcgaagtgaacgcgttggcgcgcaaggtaaaggagggcaagacttggcaggaactgtttccaggcatctcaactctccgggtttcagctgagggcgacggaatcaacgtagcaatccgcatcacccgaagggacggcgatgccgtccacatcgttccagagggcactccaggggcgacggtcctagcggtaaggaaggtcgatcaacttggcttctactcactggggctgcatgcagtcgctgagaaggttagcctctcgccgcccagagccctcgccgttgttaaggagttgaagctccaagagtcggatgactacttcaaggacttcaaggtagattcgcagcgattcaagagatattccgccaaggctgttgagaagatcaaggaagagcttccgaagctggatatggacgccgtctgggaaaggcaaaagcccacaggtagacggaaccgttga

SEQ ID NO: 537248 - DNA, 339 bp, Stenotrophomonas maltophilia
atgtcagccaaggctgcactcgctgcccgccagccggtggccgaatacctgaccgaactggaagcggccgcgaagcgcggcggcatggacgtgtgcgagcgtgacgacgaaagcggcccgttcccactgctgctggtgtggtctggcaccatcaagcccgtgtccccgcccgcgcaggccgtggatctgtgccgtgcccgcgcttcgattcagtcgctgctgaattggattgacgactgggcggaaacgccggaggaatcgggcatcgacgcaatcgaggctgaggcagaagccgtgctggccctgatcgacagccattcgggggtgagccgtgactga

SEQ ID NO: 537249 - DNA, 435 bp, Stenotrophomonas maltophilia
atggacgccgtcgagaagcgggcgcgggagctgctggctagatgcttggacgaatggggatacccatgcgaagccgagaacgtccgtggagacgaagacctggaaagctacgaatctgagctgcgcctgatatcccagctcctgtgcttcggaatggacactgcggatgggcacgaacgcgccgccctgacgccgcccgagggctacgtgcctgagcgcagcgtgctggtggctgcgacgaggctcaggaaattggccagcgccgcaacgcccatggcgcgctcggcatacatcaaagctgccgagttgatagagatggcagtggtcgcgacccgaccggatacgcctgccagtgcgacggtgaccattgcttcaaagggtgaagcagaggaactgagcaggcgacgcgttgcacgcatcgaaggggctgaatga

SEQ ID NO: 537250 - DNA, 774 bp, Stenotrophomonas maltophilia
atgtcggcagtatccgcgcctgcggcggccctggtgccgtgtggcaactgcggaagcgacgaggtgcgcatgcgcgcgcggggcagctccagcagccggcgcaccgcgcaggtcgtgtgcgcgcgctgcagcgcccggagtgagctgtgcgtcggcgcagatgcggaagctcaggcggccaaggcgtgggtacacaaaccccacgtgcctccggcgccgccggctgtgggtctggtgcgcggcagaatgccgatgccggaacaaaccctgcgacgcgatccgctcgagctgatcgcccgcatggtggtcggcggcagtttccgcgagccgtcagatggccgttcaagcatgcaacctctgacggcggcagatatctccggcgccgtcggcatgatgcgcgattccgtggccaagcaggcggtgatggcggtggcgctgcgcgcgcaaggcgtgtgcctgtcgtcgctgggtcgttccctggtcaggcgggtgatgaggcagatccagatgcagcggcgcagcggcttaaggcctgtgctgcgaatggaagaaccagctgaccgatggcgcatgaggttggtgctgcaggacgcggtgaacgaccatgtttggccggagagaaagatcccggcccaagaggccgcaaaggcagtcaggatgcgaaaaggggattatctgaaggtatacggcattgcatctgacacgctcaggcaatcggtcgaggatggcagatgggaatttaagaaaaggctctttgggggaacggcgaggtag

SEQ ID NO: 537251 - DNA, 270 bp, Stenotrophomonas maltophilia
atgactcgtgcgctgcaaattaccttcaatggcaaggacttcgagaataggccttactttcggactgtcgtcattccaacagatcaggtttcatccgttgagtacctgtcggcagcatcatcgctgactgttttcatgaagtctggccagagtcaccagttcaccaatcttacaaaagcgcagtttggcgaaatctatgctgcggtcgtggactccttgcaacctctcggatacaagatcgaggatttgcagatcaaattggacctctga

SEQ ID NO: 537252 - DNA, 528 bp, Stenotrophomonas maltophilia
atggatatcttgatcattgtcctagcattggtggcacttgggcatttcctctatgagggggctgtggcgccgacattgcgaacaaagctcaagcacgaaatgttccagttgcgagacgaacttcgttcggttcatctcgagcgcgccggtggatgtccgcaggaagcattcaacatcgttcacaacggcattaaccaatacgttcatagattgcactgggtgaccatttccttcatctctgaattcaacaggatgaattcgaaggccaagcgggccgaggtggatcgacgtaaaaaggttgtggaagagtgtggtgtaaaggagctgagcgatatcgcggcgcgtggcaacaaggtcctcgaaagcgcactctttgtgaacagcggtgccctcttggcgtactgcatcgcattgatggttccgctggctatccttttcttgtgcgcacactcgatctatcgaaaggcgtccgagatgttcgctgctcctagtggccgaactgacgaagtaatgtccaaacttgtttga

SEQ ID NO: 537253 - DNA, 270 bp, Stenotrophomonas maltophilia
atgaacgatgccgtatctgaacttctggaccgcctccactcctgtgaagttgcgattgaagtccaccgtggctatctgaaagcaatggaatacgcgctgcggatttctgtactcacccatccagagcccgagcggttgaacctagcgtggctccagctgctgcccagcatcgctgcgaggcacaaagatgacggcggcgagctcttcgctgccgccttcgagcagtcactaagacttctcaccgagcaaatcggcgacgctcgcccctaa

SEQ ID NO: 537254 - DNA, 150 bp, Stenotrophomonas maltophilia
atgatggacgcggtgctggccggcgatcccgaacgcgcgcgcgccgccgcgcatgcccacctcgagttcgtgcacaccacgctgcgcaccctcgatgacaacgaagcccggcgtgcgcgggcctcgcgcctgccttccccacacggttga

SEQ ID NO: 537255 - DNA, 1164 bp, Stenotrophomonas maltophilia
atgtctgctgctgcatccctccgcccccgcgtcgcgggctggcgctcactgttgctgctcgtactggcctcggccagcctgccggctgccgcgcaatcgatggcctgtggcacctacaaggacaccagcggcaacaccacgctgaccctccagagcgaaggccacggcctcctgtccggcccctaccaggcgaccgaagcgctgcgcatcgcccgccaggaagacgtgctcggtaccggcaacctgtccacgggccggctggagaactggtacttctcggacaatgaccgcaggatcagcacgccctatcgcgagttcacccgtgagcgctccgccgcctgcacgacgatgccggaacccatcgagggcggttgcgtgatgaacacctccgattgcctggaggcgttgccggcggccgcgccgttgaagctgcacgcctggtgtgctgagggcgtgggtgcggcctgcatgcggttgctggagacttaccaggagcaggccaatgcagcggcgccgaaggtggcggacccgccgatgcctgggatctgcagggaggactcaccatccttcgatgccgaaggctgcatggcgaccaccaaggaggtcgccttgcagatgatgggagaggcgcttctgggcctgcggcactcggtcgatgtccccttgccggcggcgcaactggatgaactggccggcctttgccgcgagcagcacggtgagacgttctgcgaggaggcggccaagtccttgtggagcggtgggcgcctgcagcaggcccgcgacgcattgcagctggcctgtgcacagcgcgcggaggcgccatcctgcggaccggccaaggacctcgctgttgtcgccggcgcgaccgcatcggcactcgcaccgattgccgctgccaacctgccctgcggcagctttgtcgccgaacgcagcgtgctgtcgcagctgcgtttcctcgacggcggcgtggtggaagccggtggccaggacgcgcgcctgcgcgcaagcctgcgcgacggccagatcctcctgcatcgcgatgccggcagcgacttcgtgctgcagctgctgcggaacggcaacctggtgggcgtcgacagcagcaaccgcttcgcctactacgagcgcgaggcgaccgcgggcaacgcccactgcgccccctga

SEQ ID NO: 537256 - DNA, 279 bp, Stenotrophomonas maltophilia
atgagcaaaaacaagacaaccctggcgggcgtgcagcacggtgggagggtgaggctggctgaccaaccgctcaccgtgcatccagttcgtgcggtgatcaacgccagatttgttgggagcccctgcgtgtcagtgcttgagggtcgcttccagtgcgaactggcttgcggccacatcgtcatccgttccggggagcatgttcgcggcaccaggtgctccgttcgggcgccccacagtgcccagtgcaaccaatgcaagaaggagcccgcccatgactga

SEQ ID NO: 537257 - DNA, 387 bp, Stenotrophomonas maltophilia
atggcgatcgcagcgacaaaatttggcccccgctggggcgcagccacgttcaagtatcgcggtggctccaaccggatcgaaacgaagtggtctacgagccaatactgggccgggagcgcgtacctcgccggtgaggcgccgaagacaagcgatccgcaggagccggacggcagatttcgcattctcaatcagcccgcgcaggggcgcgtcctggtgctggagcgcggatcgggcatctgtgttgcatccgtactgagtaagccggatggaacctggcgagtggatcggctgaacgctgcccatcgctacacggtggtcggctttgatgacactggcgggcagaacgccgcgattcaggattggatcgcggctgcgaccgaaggctga

SEQ ID NO: 537258 - DNA, 675 bp, Stenotrophomonas maltophilia
atgctgaccaataccaagctgcgcgatctcaagccgcaggacaagctctacaaggtgaacgaccgtgacggcctctacgtggccgtcacgccggccggggcgatctcgttgcgctacaactactccatcaacggcaggccgaaggccttcaccttcggccgctatggcgtcggtggtatcaccctgtcggaagcccatgagcagttgggcgaggccaagaagctgatcgcggtcgggaagtcgccggccaaggagaaggcgcgagacaaggcccgtatcaaggacgccgagactttcggtgcctgggccgaaaagtggccgcgcggctaccagatggaccgtttcacccgtgacatgcgccgttcagtcctcgagcgcgagctgaagccgaaattcggcaatcaaaagctggttgagatcaaggcttcggcggtggtcaggaaatcggccggatcaaagggcgtaacgggtgctaggcccacgtcgacgcggcggaccagctcgatagcttgggcgatgttagccagacgggcgcgcaactggtcagaggtaacggcacggcctgggtcggccttcagcgctcaaaggcccggcctacttgtgcatgcagccaggcttcctcggcttccttcctgcccatggttcactcttctgctggattctcagaatgcctga

SEQ ID NO: 537259 - DNA, 570 bp, Stenotrophomonas maltophilia
atgaatcaacgcataggatacgcacgctcgactgatgatcagcacctagacctgcagcgcgacgcgctccagcaggctggatgcgacgtgatctacgaagaagcggccggtggcaaaaatgcagcgcggccggaacttgaacagtgccgtaaggcactgcgggcaggggacaccctggtggtgtggcggctggatcggctcgggcgcagcctgcccgacctggtgcagatcgtgaccgatcttgagcagcgtggcgtcggctttgaaagtttgacggaagagatcgaaaccggcagcgcggccggcaaactgattttccatgtgttcgcagcgctggccgcatttgagcgtggcctggtccgggagcggacgcaggccgggctggctgcagcgcgcgcccgaggtcgcgctggtggtcgcaagccgaagctcgacgaacaacaggtgagagagatcaaaaccctgctgcgtgaccccgacattcaggtggcggatgtggctcgccgctatggcgtatctcgaaccacgatttacaagcattgcggtgtcgtgcagccacgtcatcaatag

SEQ ID NO: 537260 - DNA, 618 bp, Stenotrophomonas maltophilia
atgcgtctcaataagcaggacggtggccgccgccaatgcatttcggtcaccaacaacgaagtcgctgccgacgagcaaaaaacgttacgcgaagcaggcttgcgccccggagatgccgaatgggaaaagtggggtatttgtgactacattacgaaacctcgcgttgccgctgccattaccggcttaacgccagacggcgagccgatcaagggtgactacaaattcaccgatgaatttccgatggccgatggctttgaggaaaacgccgagttctttacgctaacatatgagacgccggtatcggtcaattataacctggcgttcaacaggattgcgccgttgctgtggctgcgagccggagcgcggggcggccgcatagacacgctgcccggcgatggctgggcggtagcagacgcctatggattgctaagtaatgtggatgcggccacaccttttatcaaggcgttggctaaggccgctgaaatccggattgcctatatcgtcaccgatgacgatcgccgctttcaggccattgccaggcgcttgcctgatggtgtcgagccggtgcgcctgtacgaatcgtatctgactaatttcagcttcaccaacggagagtaa

SEQ ID NO: 537261 - DNA, 2601 bp, Stenotrophomonas maltophilia
atgaagttcacgctaaaagactaccagcgcgacgccgtccgcgactccttgaacaatctgggcaaggcccgccgcctgtggcagggcgaggccgacaggacggcgttttcactgacggcggttaccggcgcgggtaagaccgtgatggccgctgccacgttcgaggcgctgtttcacggtgacgatgaattcagcttcgacgccgaccctggcgcggtggtgatctggttcagcgacgatccttcgctgaacgagcagacccgctttcgctttatcgaggccagtgaccgcatcaattacaccgatctggtggtggtggaaaacaccttcaaccggccgaagttccaggcggggaaaatctacttcctcaacacccagaagctcagcaagaacagcttgttggtgcgcggctatgaccctgaagagatgtccgccaagcgggacggtaccttcccggatatgcggccagatctacgggcctatacgatctgggacaccatccagaacaccattgaagatccggatttgacgctctatctggtgctggatgaggcgcaccgtggcatgggcgcgcaaacagccgccagtcagaacgccaagagcaccatcgtccagaggctgatcaatggcgtgggcagcgtgcctggtatcccggcggtttggggtatttcagctacggtggaacggttcaataaggcgatcgagtcggcaggcaagcatatcaggctgcccaacgtggaggttgacgcttcaaaagtgcaggagtctggcctgatcaaggacaccatcctgctggatattccagataacgttggcgatttcgataccgtgctggtgcgacgagcggccgataaattgaaggaatcaagtcttgcctggagcgcttactccaagcagcaacaggaagcccaggttgtcgtgccgttgatggttttgcaggtacccaacacgcctgaccccgatgaaatcgggcgggcgctcgataccattttcgatcgttaccctgagctgccgtctgccagcgtggcacacgtttttggagatcgcacctcgcagcgcttcggtaaccgcgacgtgccctacattgagcctcagcgggttcaagaatcgaactgggtgcgagtactgatcgccaaggatgcgatcagcaccggctgggattgcccgcgtgccgaggtcatggtgtcgttccgtgcggccaacgacaaaacgcacatcacgcagttgttgggtcgtctggtgcgttcgccactggcccgccgtattcccggtaacgaccgcctgaatgcggtggactgcttgctgccgaaattcaatcgcaaggccgtggaagaagtggttgatgcgttgacgaccggcagcgaggccgccacaccgggacgggtgttgatcgactacatcgaggtgcggccgaacccggcggccgcgcctgcggtgtgggaggcattcgaggcgttgccgtcgcaaacgcggccgcaacggggtgccaggccggcggtcaggttgaccgcactggcgcatgaattagtatccgacgatattctgtccggcgcaggccaactggcacatgccgagatgcatacggtcttggatgcgtttcaggccgacaacgaggccaagatcaaggccaagcggcagtcggtgctggtggtggacggcaagacggtgaaggctgacttgctgggccagggccggagcctggagaaattctgggaagacgccgatgtggcagtcatcgacgatgcctaccgccgtgcggcgcgcatcttcagcccgccgattgcccattcctatgttgatcatctggccagtcaggaggccgaccgcgacgaagacccggagggttttcttgaggccatcatggaggcccgcgtaaccgttgccggtttggggctggtgatggaagcacaggcttatttcgatgccgaggccgataaactgacgaaggactggctggtcaagtatggggcgcagatcaaggcgctcagtgacgatcgacgggaatcctacaggcagatcatcgaaatgagcgcggagccgcaagacgtgggcttgctcaagcccgaggctcgttatgaggcgaccaaggcgaacgagaacggcaaggtgagagtgctcccgctctgggatggccacttgctgtgcaacgaggccggccagtaccccgctgaactgaatgactgggagcggacgatcgtcgagacggaatcggcaaagccgggattctcgttctggtatcgcaacccgcagcagccagggcaggcttcgctgggtatcgcctatgaaaattctgggcaatatggaattgttcgcccggactttctgttctttgctactcagggggatggctcccttgtcgttgatctggttgatccgcatgggctgcatttgagcgacgcgctggtcaagctgcaaggcttggcgctgtacgcagccaaccataccgatgcctatcgccggatcgagtccattgccaaggtgaagggcagtgacaaactgcgcgtgcttgacttgaagcggccggaagtgcgggatgcgattgccgtgggccaggatgcagaagttctgttcagcagcgggttggcagatgattaccagtaa

SEQ ID NO: 537262 - DNA, 2676 bp, Stenotrophomonas maltophilia
atgatggaaaatctgcgaccgaagcagtcagatgctcgatctgtggtcttttcagaaggggcgctgtgggtccgcgctgactttcatctgcatacccgagcggaccgtgaattcaagttcacgggcgatgacaacttttacaacagcaactatgtggatgcgttggagaaagcgggcatccgattgggcgtcattaccaaccacaataagttcgacttcgaagaattcaaggcactgcgaaagactgcccagaagaagggtattgcgctgctgccaggcgttgagttgtcggtcaatgacggggccaatggtatccacacgctggttgtcttttccgatgattggttggccgatggtcatgaccatatcaaccccttcttgggcgtctcgttcaaaggaaaagtcccagcccagtatgagcaggaaaatggtcgatcttcgctgtcgctggtgaataccatcgaggagctggaaagctaccaccgcgacttctttctcgtctttgctcatgtcgaagcgccgagtgggctttgggccgagctggatggggggcgtcttgccgagctaggccgaaatgagttgtttcgccgccgcacgcttggctttcagaaggtgcgcacatacaacaaggtgcaagagaaaaacaaaccctgccggactaaagctcggctgcatctaggtgagtggtatcccgccgaactcgaaggctgcgacgccaaatgcatagaagacattggtcagggcaaagcctgttatctcaaattgggcgagctgtcctttgaggcggtcaagtttgccttgagcgatcccgctgcgcgggtcgccacggagccgcccaagcatcaggcgtcgcacatccgcagcatccacttcgacggtggcattctcgatggccagacgctgcacttttcttccgagctcaacacgctgatcggcattcggggcagcggcaaatcatccatcctggaggcagtacgctacgcactcgacattccacgcggcgagaaggcccaggacaccaagtacaaggatgagttgatccgccatacccttggcagcggcggcaaggtgacgctgacagcatgtgacgtgtacggacaggaattcaccatctcccgcatcttccgcgaagccccgaatgtctatttgggcggcaagttgcaacccggcgtgtcgatccgagagaccgtactgcgccgtccgatctacttcggccagaaggacctctccagcaccggcgaaggcttcgagaccgatctggtggaaaagctggttggtgagaagctgcgtgtgctgcgtgacgaaatagaggttcaacgccagcgcgtgcgtgacgctgctcagcgctggctcaagctcagcaactcggccgaactcaagcgcgacttcgaaacccaactaaatgatgccaacttccgcctgaccaagttcgccgagcacggtgtcgccgataagctccaaaaacgacttggcttccagcaggacgccacagcgctcgcgcgcatgatggagcgggcagacagcttcattctcgctctaggaagtctgattgccgaacatgaggacgagctgcggaacgcaacaagctacgtttctaagcagaacccggatttcttcacggcctactacgccgatttctccaatctcgttgccaaggtcgatcagctcaagcagatcgagcgagaagcgaacgtcatcgcagctcgcctcaagaccaaacagggcgaatttgaaggcgcaagcaagagccttcaggaggagttcgcacaagtcgagcgtcaactagctcaagaactcaagcaaaccggcatgacagccattcagccggacgacttcctggcccagcagcagcgcaaaaccaaggcggagcaaatgctggaggcgctgaccaagcaggaatcacagcagaccagcatccgcgacgcgctgtttgccgagatcgacaagctcaatgaactatggctgcgcgagttcaacaccatcaaggcagagttggatcgcgtgaacgctggccacactgccctgcagatcgaagcggacttcaagggtgacaaggaggccgccatcaacttcatgcagcaactctttaagggcagtaacatccgcgaaaccacgctgcgcgccgtgatggatgactatgccgatttcggcggccttctgcgtgctctgccgggagccttggcgagggctggcagtagccccgaggtcttcgaaaagaccttcatgcagaacctgacagatttcgtcacttggcaggtgcccaaccgcttcgtcatccggtatcgcggcaaagagttgaagcaccactctctcgggcagcgcgcttcggcgctgttgctgtacgtgctcagtcaacgccagaacgacgtgatcattatcgaccaaccggaagacgatctggacaaccagaccatttacgacgatgtgatcaagctgctacgggaaatgaagcctcatgcccagttcattttcgcgacccacaacgctaacttcccggtgctgggtgacgcggaacaggtgcacgcctgccaatatcaggacgagaaggtcgtcacgcgaagcggcagcatcgacgcccggccggtgcaggacgccatcatcaacatcatggaaggaggccaggaagccttcaaccgccgcaaagaggtctataacctatggaaaccacagagctga

SEQ ID NO: 537263 - DNA, 1176 bp, Stenotrophomonas maltophilia
atggaaaccacagagctgatcgacctgctcagcctgggcgaggacagtaggcagcagttcaaaacggacatcaacaatcctgacgccttggcagcagaaatcgttgccttcagcaacaccgctggtggtcgcatcttcattggggtgaacgacgacggttcggtgcgcggtctatccagcgccgatgttgctcgtctcaacatgctcatcgccaacgtggcctcgcaggtcgtgcgtccagccgtgaatccgctcactgagaacgtgcctcacccggcaggcacggtgctggtgctctccgtcgctgaaggtgttaacaagccctacatggacaagaacggcgcgatttgggtgaagaacggctcggacaagcgccgggccacctcgcgcgaggaattgcagcgcctgttccagcaggcaggtttggtgcacgccgacgaaacgcccgtagcgggcttgagcacgggcgatgtggacatgccctatttcgaaacctttttcgagcagcaattcggtgagtcgctcgcccagcataaccagccgctgccgcaggtactgaccaacatgaacctgatgaaccaggggcagctcaacgtggcgggcggtctgctgtttgccaaatcgccttattacgcgctccctgccttcgtcgtcaaggccgtcgcctttgtcggcaaccagattgaggacgaacgctacatcgacagccgcgacatcgtcggcaagctggccgacgtattccagcagacgctgggctttgtagtcgctaacacccgcgcggcgcagggcgagcagggctttaactctcaagggcagcctgagattccccgcatcgtctgggaagagctggtcgccaacgcactcattcaccgcgactacttcgtcagcgcgcctattcgcgtactggtcttcgcggatcgtgtcgagatcatcagccctggccacctgcccaacaacctcactatcgagaacatcaaggcaggcaactccaatatgcgcaaccccatcctggcgtcctttgccgccaagctcctgccttatcgcggattgggtagcggcttgctgcgctcactgagggcatggccgcagatcgaacttatcgatgatcgggccggcaatctgttcaaggctattgtggcgcgtcccaacttgctggagccggccggaagttcttga

SEQ ID NO: 537264 - DNA, 138 bp, Stenotrophomonas maltophilia
atgctgatctgcagggccgaaggtctcggggccgcgtatttccacggccacctgtacgtcgatcgcgaacagggccgtgcctgcgcgcaggacgacaacctcgaacaactcggcgggcgaggcacgtgtttccgttga

SEQ ID NO: 537265 - DNA, 771 bp, Stenotrophomonas maltophilia
atgctcttaagtcctactatcgtggtcgccccctggaaactcttttgccgaagatcagtaacaggttcggctatcccggagcacaggaaatactggcgaagaatgggggcgacgctgcccgagccattgcgcgatctgggaatacaagtcttccgtggactgtcggtttggttggtgctggttcggccaaggcggcaaacagcgctgtcactgcggcggggagggaatgtggctgcaattaaaatggtggaaggttctctcgatggcgagttctatcttgttgaatataaaggcgtcgggaaaaggcgcgtagcgaagatcaacgaagatggcgttcttgtagtatccgagtccgcttcttcttcgggagcgcttcctctacggggcgttataggggaggggaagtctgggacgaggtacgtgccaatggcattcctctcgtggcatctggatgcttcgcacgggacgcctgattattcccgaagccttgtactgatgatcgacggaaagttgatgggggacggtttctcggcgccagtgatttcttggtcgaagcgatgcgtatcgagagaattttatgtgagccttgaggatggttggaacttcaaagtgacgtacacggcgccgttaattagagaattctttatgcggatgaatgttggtggaactttggacgcgcagcccgtggattttattgagcagataatgatggtcgtcgcggaattgaggcctgattggatcgtggcggctgcggatcaaaatatctcttaa

SEQ ID NO: 537266 - DNA, 336 bp, Stenotrophomonas maltophilia
atgacccgcgatccgcagcggcaggccgagctgggccgctggggcgaagccagcgaccgccagaccacggccgatgccatgcatgcggtgatgaccaccgacctgcgtgacagcatcgcctcgatcaccgcaccgacgctggtgctgggcagctgggccggctaccagccgatgggcggcaccgaggacagcacgcgcgcggtgttccaggcgcagtacgcgaaactgcagggtgtgcagatcgcgatgagcgcgcagggtttccacttcctgatgtgggatgatccgcgttggttgcgcagtcaggtgcaggccttcctcgaccaccaccactga

SEQ ID NO: 537267 - DNA, 1029 bp, Stenotrophomonas maltophilia
atgttcgtctttggccgtataccccaggaaggttggttccatcacgacctgctggacttccaggtcatgtccacactattcatcccaccggaagacagcggtggcccacagcgcctactcgcgctggactattgggggcagctggaataccacgcccgcgttggcgccactattgagcgcgtgaaggcggatacaggcggcctgacccggattcggcagttgggtgaagatctgttctgctgcggtgtgcacggaatgatctatcaccgcaccgaggccggatggaagcaacttcccacgcactttccggcagccgagcacagcagtattgaggacgatctgaagtcgatcgactttgaaacgtggcttttgtattgcggccacatattcgaacgtgacggcgctgccccactgcccgctgatccggcgaagcgtgaggccgagctgcgccgaaagttcgacgaaacgcgcagccagattgccgagggccgcaaagaccctggtcatcgggagtggctcgccagtctcgacgcgcccagcgtgaatgacctctgcggaaccggcttaacagacctctacgcgatcggctctgatggcctgattgcacactggaacggcttgaactggacgctgcccgaacaagtcaccactgcggagctgtttcatgcctgcagaaccgacctaggccgcctcgtccttgttggcgaggaaggcaccgtcgttaccggcaacatatccactggatttgagcgcctgctccacgacgtaggcgatgaagtcaatttctgctcggcctgccaacatgggcaacagatctacatcggcgctgaatatggaggcctctacgtctacagcctcgaaaccggtgcaattgaacccttgctggaacgcatccccgaagaactgagagatgcaacgattgttgatatcagttccgtcggcaacgtgctgtgggtgctgacgccctgggacctgattcgatttgatggcaccgcgtggcaggtcatcgttcaccccgacaacggatga

SEQ ID NO: 537268 - DNA, 144 bp, Stenotrophomonas maltophilia
atgaagaagtcccgtattgccgaggaacagattgcctacacgctcaagcaggtcgagcgggggaaagaaaaggcccgctatgcgggccttttgcacctcgtgcagcagatcggtccagacctaatcaaaccccaacaggattag

SEQ ID NO: 537269 - DNA, 825 bp, Stenotrophomonas maltophilia
atgcgcatgcaccctgctgaacagtacaacaagatccgccgcatcatattttcgactgccaatgacccacagaagggattcgatacagcgtggaattggctgagtaactatcaaaaggaccttgatcgtccgagttacacgggactttgtgccgagctagcattttatcaacaccactcccatgatttttccctaacagtcgcgggggacatgggtgagcatgcagactttgctggcatattcgaaggcagggcaacgcgctttgacgtcacgaccaatcttagctacaaaaattttgagacctatcagccttatatgggccgtggtccacgctacaaagtagttgtagttaagaatactgattttgaagtcatagatgtattggatttggcattccctcgctgtcatgaatgcgacggatatttattcccagctgtggtgatgtgtagagagaaccacaaccgccacggtgatccaatgatgacttacgatcaggtgcttatggatatctgctccggttgcgatctacttcgagagaaatcgcgaacctcgcactatgacatgccaacggctcaagagtacttagatgaggcttggacgaacgatgctgactctgcgagcgcatcgaccgaacagcatctcttgaaagtttacaagcacttccaaaaagattatgaccagaggctaatgattcttggatcacatcagtatgtgatcactgatcaagatggcggaggatactggggaataaactttgattttgtcaacaaagccgtagaggaagacgttccgtgcgaccccattgaatgtggtccagatttttga

SEQ ID NO: 537270 - DNA, 231 bp, Stenotrophomonas maltophilia
atgaacgaacatgagctacagccgtcgcttggcatgaccatgcaacacttcaggacagccctggagctaggtcaggagactttcgccgacagcatcggcatgcagcgcgcctactacagcgcgcttgagcggggcaagaagaatccgactatcgccacactccatcgagttgtgatcgggctccgcattacaatgtcgcagctgttctccgtcgcggaatcacgcgactag

SEQ ID NO: 537271 - DNA, 849 bp, Stenotrophomonas maltophilia
atgacgatagttgcaggtgtactgtgtggtgttcccatctgccttctcgctcttctactatggtgtgcccggtcacgcaggcgtcgagagaagcgtaaggatcgtacatctgtagcgcagaaggccaacgcggtccgcatcgcagcatgggcgcagtcgcggccgcaccaagcagccaaaatgacgattagatggggcgctggcccggtgggtttggggtgtccggcctttcgcgatatgctagtacgacgaattcgtctcggcctcccttttatcatgaacaagcttgcagacaagaggatccgatctgcattgaagtcacacttggctcgatcagcgcctgtagcgatccttgatgaggtccgtgttcacaacgggaatgcgatcgccgatgttgttaccgtagatgatgctgcggcgcattgctacgagatcaagggtgagggcgatgagattcgccggatcgtccgtcagggggcattctatgacctcgcctttattaggacgacgttggtcactactcaaaatcatctctcgactgccactgcgctggctccagagcactggggaattcttgtggcatcggaggctgaggaaggtgtggtcttccgtcggcttcgaaacgccaggaagagcccgcatttcagtaaggagattgcgcttctcacactttggaggagcgagctgatcagcctctgcacttcacctgacgaacagttgaagaagttaagtagagaaaagctcgccgccaagattgccgtagagcgacccattagggagatcacccaccacataggcgatctcctggtgaagcgtcaggcgaacaagcgatggtctctggccatgtag

SEQ ID NO: 537272 - DNA, 1077 bp, Stenotrophomonas maltophilia
atgcgtaggtacaccccgttcctaaagatgaaggcaaatgaattcgccgctctaaaggagctaccagcggacatctatccaaaaatcactccattcttcgacttgccgcaccagaaggaacgagacgccgccggtctagataagctaatttccgactgctccaaaaagattaagaagatgtcggatcgcatccctcaattcttccttgacgcgtatgacatacctgaaagcctagccagcaaaggcgtaggagttttcagcaatttggcacttgccttccaggatcagaacttcataccagtcgccggacttgatcggtcgcatgcttacatttcatcgatactgctggcacaatccaacggccttctgacgtctaaaacactcgcgattcgccttgttgaagatgacttcgagtcgtacgcagcatgcaagaacgatatagcccagctagtcaccgacgcacagtcggcaggtttcagtgagttcatcttggtattggatatgcggatctgtgtaagcaagtcgccgcacacccttgccgccagtctgctgaagttcatcggagcagcgacgcaggcccccacattcaaacagatcatcataactggctcatcaataactgctcagattgtagagctcgtttcgaccgggacgacgcaaacgatcgatagagtcgagcttcagacgttcaacctgataaacacgctaccgaaaggactggttggcttcggcgattacactgtcgtgagtccggactacagcgagatagatttccctaaagaacttcttcgaaacgtaaccgcccccaagctatgctatccatataatgacgttcactacattgatcggggcagcgctcttaagacgcacaagcttgggaacgggcaatacaacagcatggcagcaaagctcgtcaaagagccattcttccgtggagccggctattcatttggcgaggactttttgctagagaaggcaagaaaccaggggaaagccgtaacgccgtcttcaatcttgaagccgacaatttgtgctcatatgacctacatggccagagaccatcgcttgttcgcctga

SEQ ID NO: 537273 - DNA, 846 bp, Stenotrophomonas maltophilia
atggactttgatgatttcccgcttagcccgaacagaacggtcaaaaccaatagctatctcgaagcctatctcaaagcccagagaactctacgcgctagcggccagaatgatgtaagtaggtcgcgtgacctcctggcacttacaaatcaaatctacgcaaagagccaaagtggcgttgctcttctaagagctcatggcagcgcgccctcggaaggcgtttcagcctggctttccagaatcctcaccatagcgcactgggcggtgatcagcggcattccgaagacctttcatggcttagacatggagttcgcccagggcattccacgcacaagcaagtccgcagatgcaattcgaagtctggagaagcagttgctggaacgtggaataatattaatccacgaagctgcctctccgggatcgaaggttgacggatgtgtgatgaagttggaaacagggcacatggtgatagggatgtcgcttcgatacgcgcgcctcgattactactacttcactctaatgcacgagctcggtcatatcgcactgcacgctaatgagctcgacacaccaatcgttgacgacctagatgagacagaagaagaccatggtagcgagatcgaaaatgaagcaaaccggttcgctagagacctgctgatcccccgctacgaatggagaacagcagacccccgaaagtcactcagaaaggaagatgtaatggcttttgcgcagaagattggagttgcgccgcagatcgtcgctggcaggatcaggaatgagcgaaagagacatgacctcttcagcgcactcgtacatgaggtgaacgttcgggagatcctcaacgatgcgtag

SEQ ID NO: 537274 - DNA, 705 bp, Stenotrophomonas maltophilia
atggttacgattgcggatattaaggccatggtcgctgcagcgcctggccctatggttaacggcccgcccttggcacaagggcagttggtccgtttcgacggagtgcctaccgagtatgggattcacgaaggttggaacatccagctagcaaatgcctgtgacgacctttggggcaatttcaacgttcagcttcttgagcatcttgccgcccaaaacagggcgggcgtcgatatgacacaggtcatggaggacgtccagctggacgatgctcattggagttggcttgctaaggcggctcattacacgagcgacgaataccgctggttttttctaatggcggatgggagccctcaaggggcgtgcttgatctacttccccaaagaaagcgccattgacggccagaacattttctacattgagtacatcgccacagctccttggaatcggcacaaccccatctgtgaaaaacgtttcaggggagtcggcacaatcttggtcgactttgcgaagagctatggcataaatcagctgggcctacggctcgggtactgtcttcacgctctgcccaaagcagtgccgttctacgagtctctcggcatgatcgctttcccgcatagagataaggacaatctcccctactttgaaatgccggcaatagcacctccgccaccagtgccggtaatgggagcagctaatggactttga

SEQ ID NO: 537275 - DNA, 300 bp, Stenotrophomonas maltophilia
atgccggtctcctcgggcacgactcaggccaccaatacttcggtctatgcatggcggtcctccggcgttgaaggtccggtcgcgtccagcgcgccccgagcgcttaccaccgaggaggtcaagcgtgtcgtcccggatttcgtagcttcggctcagaaggcaatcgctgccggctttcacggcgcggaggctatggcagccgacgccttcttgttcgaccagttcctgagcagttcgctcatccagagcaccgaccagtacggtggctccatcgggaaccgccaatcgcttgttcactga

SEQ ID NO: 537276 - DNA, 291 bp, Stenotrophomonas maltophilia
atgtccgaagccgcaaccggcccacgcacggtgggcggacagacctacacgacgcagccggtagaggctcggcttggcccgcgccgcttcatgttcccggccaacctctactacaaccagacgggccccctggccgatgggggcgtcatgctcacggtgttctggccggatttcgatgcagcgcctcccggtgatcgcccggtgcgcagcacgcaggacagccggcggcaggtactggtcgagcttagatcgcgttcccatccagaactatctggcacgtcggtccagtag

SEQ ID NO: 537277 - DNA, 168 bp, Stenotrophomonas maltophilia
atgagccgcctgcgcgtcatcatcggcggtaccgcactggccctgctggccgctgcggtgccgatcgcggtcatggcctatgccacctgggaccgcgcggtcagcgtcgaacagcagcgcctgcgcgacatcgccgatcgcaccctgcgccgctccgaccggccatga

SEQ ID NO: 537278 - DNA, 222 bp, Stenotrophomonas maltophilia
atgagcgccccctccaacatcgcggcaatccgccacgcagtcagcgcgctgcacggcgccgctgacgacggtgcagacactcgtcgttacgccgatgctctgcaggaggccggtgcagccattgatcagctggtggacgaagcgcgccgatgctgtgctggcaccggcgatctgtccgaccttcgcgccgccctcgcccgcgtcaaaggcggtgccgcatga

SEQ ID NO: 537279 - DNA, 186 bp, Stenotrophomonas maltophilia
atgcgcatcgtctatcgcatcaagtggagcaacttcgtaaaagcccgcattggcgaacacgacatcgactttttggtgatcacgctggatccgtttgtaaagccgagcgacgtcggccgagtcggtgacgtcaccttgcacgcccaccgcgccatggccgatctctttcacggcctcggcgagtag

SEQ ID NO: 537280 - DNA, 963 bp, Stenotrophomonas maltophilia
atgcacctggacgcccttgccgccgcccgtcgccacgaacaccgcttcgacgacggcaacccgctggccgaacgcaatacccgccgcgccctgtggctcaccgtcagcatgatggtcgtggagatcgtcggcggctggtggttcaactccatggccgtgctcgccgacggctggcacatgagttcgcatgcgctggcgctgggcctctcggtgtttgcgtaccgctgcgcacgccgctacgcgcacgacccgcgcttcgccttcggcacctggaagatcgagatcctggccggctataccagcgccatcgccctgctcggcgtggccgcgctgatggccgtgcagtcgctggagcggctgtgggtaccagcaccgatccactacaacgaagccatcgccatcgcggcggtcgggctgggcgtgaacctgctgtgtgcctggtggctgcacgacagcccgggccacgcgcatcatcaccacggccatgaccacgggcatggccacgaacaccacgaccacgggcatgcgcacggtcacgacctcaacctgcgctcggcctacgtgcacgtgctggccgacgccgccacctcggtgctggccatcgtcgccctgctcggcggcaagctgctcggcctgacctggctggacccggtgatgggcctggtcggcgccgtactggtcacggtgtgggcggtcggcctgctgcgcgacagcggccgcatcctgctcgacgcgcagatggacgcgccggtggtggccgaagtgcgcgaagtgatcgaacagggcccgtggccggcacgcctggccgacctgcacgtctggcaggtcggtcgtggcaaatacgcggtcagcgccagcgtggtcaccagtgacgccacgctggatgccgataccgtgcgcaacgcgctggccatccacgaagaactggtgcatgtaacggtggagatccaccgcagcgagtga

SEQ ID NO: 537281 - DNA, 807 bp, Stenotrophomonas maltophilia
atgagactacacacgaccgggcgacccggcaagagcaagaccaggacaaaggctgaaccatcgaaacggtgggaatacttgtccgacagcagccccaaagaccggtcgtgggacacccaccgcagcgaagcggagggggtggaagagcacttgaagagccccggcacggaacggtggatttggaagcaaggcaagcgcgtcgaggaatgttctccgtcgcttggctttgccctcaccgctgacccggagactggggaagccggtttgaagttggcgcaagccaagttctgccgggttcgcttctgcccagtgtgtcagtggagacgttccctcatgtggcaagcccgcttccatcaagcgttgccggagttgttggctaccgtgccggatgcgcagtttttgttccttaccgtgacagtgcggaactgcgcgatttcggatctgcgcgaaacgctaaaaacgatgggcaaggcatggaaccgcttcacccaacgacgagagttctcagcgattgaaggctggataagaaccgttgaagtcacacgcggaaaagacggttcggcgcatccgcatttccatgcgttgttgttagtcaaaccgagctacttcaaaaagcattacgtggctcaatcgcagtggcttcaggcgtggcgcgaagcggctcgcctcgactacatccctcaagtccacatcacgaaagtgaggactaaaaaagccgaccgcttggccttgggaagcgccaatgcgtcatctcccaaggccaagcggtcggcttttttagtcctcactttcgtgatgtggacttga

SEQ ID NO: 537282 - DNA, 843 bp, Stenotrophomonas maltophilia
atgccagtactcacattgtacccgcatggcgggaagggcggtgttgcgcccatgaaaaacagccatacccgcgccctcaggggtgacgttcagggctggtctcacggcgcgacacgccgtaacaccgagttcctcatgtcggtccgtgaagaccgacttaccggggcaggggttgctctcacacttactcttcgggattgcccgcctacctctgacgattggcacaagctccgccgagcttgggaactccgtatgcgtcgctcaggcatggtccgtctccactgggtcacggaatggcagcgccggggcgtaccccacctccattgcgcgctctggtttgaggaccggtacgacattgcctctgcggtagaccactgggtggcagtggcaggcgcctacggcgcgggccaccgtggtcagcatggccgcatcatcgatggtgctgtgggttggtttcagtacctcagcaaacatgctgcccgtggtgtttctcactaccagcggtcaatcgataacgtccctgaggcatggcagaccaagacaggtcgcgtatggggcaaatgcggggaatggcctgtccaggagaagctgaagatccatctccaagaccaattcggtgacggtggctggttcgcctaccgtcggctcgttcgctcttggcgaagggctgacgcccggtcatcaggggatgcgtaccgcatccggtcagcgcggaggatgctgcaactctccgatccagtccgcgcccgcctgatcgggttcatggagtggatcccttacgaaatccaaagcgctcttttggccaacctggctatgcgtggctatcagatccacagcatctga

SEQ ID NO: 537283 - DNA, 588 bp, Stenotrophomonas maltophilia
atggtgcgggccggtatggtccggctgcactgggtgaccgagtggcagcgccggggcgtgcctcatctccattgcgccctgtggttcgaggacaggtacgacattgcctctgcgatagaccactgggtggcagtggcgggcgcctacggcgcgggccaccgtggtcagcacggccgcatcattgatggccctgtgggctggtttcagtacctcagcaaacacgctgcgcgcggcatttcccactaccagcgttcgatcgacaacgtgccagatgcgtggcagaaaaagaccgggcgggtatgggggaaaggcggagattggccggtgcaggagaaggtcaggatcaatcttcaggaccagcatggggacggcggctggttcgtctaccggcggctgatgcggtcgtggcggttggccgacgccaggtcatcaggggatgcgtaccgcatccggtcagcgcggaagatgctcacctgcaatgacccagttcgcgcccgcctgatcggcttcatggagtggtcgccctacgaggtgcagatggcccttctggccaacgtcgcaggccgtgggtactcgatcacctgctga

SEQ ID NO: 537284 - DNA, 732 bp, Stenotrophomonas maltophilia
atgaccagcaacgggaaaggaccgatgccagtactcacattgtacccgcatggcgggaagggcggtgttgcgcccatgaaaaacagccatacccgcgccctcaggggtgacgttcagggctggtctcacggcgcgacacgccgtaacaccgagttcctcatgtcggtccgtgaagaccgacttaccggggcaggggttgctctcacacttactcttcgggattgcccgcctacctctgacgattggcacaagctccgccgagcttgggaactccgtatgcgtcgctcaggcatggtccgtctccactgggtcacggaatggcagcgccggggcgtaccccacctccattgcgcgctctggtttgaggaccggtacgacattgcctctgcggtagaccactgggtggcagtggcaggcgcctacggcgcgggccaccgtggtcagcatggccgcatcatcgatggtgctgtgggttggtttcagtacctcagcaaacatgctgcccgtggtgtttctcactaccagcggtcaatcgataacgtccctgaggcatggcagaccaagacaggtcgcgtatggggcaaatgcggggaatggcctgtccaggagaagctgaagatccatctccaagaccaattcggtgacggtggctggttcgcctaccgtcggctcgttcgctcttggcgaagggctgacgcccggtcatcaggggatgcggtacgcatcccctga

SEQ ID NO: 537285 - DNA, 213 bp, Stenotrophomonas maltophilia
atgtttgctgaggtactgaaaccaacccacagcaccatcgatgatgcggccatgctgaccacggtggcccgcgccgtaggcgcctgccactgccacccagtggtctaccgcagaggcaatgtcgtaccggtcctcaaaccagagcgcgcaatggaggtggggtacgccccggcgctgccattccgtgacccagtggagacggaccatgcctga

SEQ ID NO: 537286 - DNA, 213 bp, Stenotrophomonas maltophilia; identical to SEQ ID NO: 537285

SEQ ID NO: 537287 - DNA, 705 bp, Stenotrophomonas maltophilia
atgtcgatcagggaggaccgcctcacaggagccggtgtggccctgacgctcacccttcgcgactgccccccaacctccgacgactggcacaagctgcgccgtgcgtgggagaagcggatggtgcgggccggtatggtccggctgcactgggtgaccgagtggcagcgccggggcgtgcctcatctccattgcgccctgtggttcgaggacaggtacgacattgcctctgcgatagaccactgggtggcagtggcgggcgcctacggcgcgggccaccgtggtcagcacggccgcatcattgatggccctgtgggctggtttcagtacctcagcaaacacgctgcgcgcggcatttcccactaccagcgttcgatcgacaacgtgccagatgcgtggcagaaaaagaccgggcgggtatgggggaaaggcggagattggccggtgcaggagaaggtcaggatcaatcttcaggaccagcatggggacggcggctggttcgtctaccggcggctgatgcggtcgtggcggttggccgacgccaggtcatcaggggatgcgtaccgcatccggtcagcgcggaagatgctcacctgcaatgacccagttcgcgcccgcctgatcggcttcatggagtggtcgccctacgaggtgcagatggcccttctggccaacgtcgcaggccgtgggtactcgatcacctgctga

SEQ ID NO: 537288 - DNA, 588 bp, Stenotrophomonas maltophilia; identical to SEQ ID NO: 537283

SEQ ID NO: 537289 - DNA, 240 bp, Stenotrophomonas maltophilia
atgaaccgttctgttgtcatctacgggccgcaacgctgcggcaagacctccaacgcacaggaactgcgcgcgcactttggcctgcgggaggtactggacgactgggacggccacaccgcgtatcccctggaggacacgctcgtcctgaccaacaatccggacgccgttgctcaccaatcgtcgcgtgtcctgcaccacggctcggcaatgcgcgaactgctcgcggaggcccgcgcatga

SEQ ID NO: 537290 - DNA, 513 bp, Stenotrophomonas maltophilia
gtgttcgaagccgccgtaaccgcctatgttgcgactctgcgcagcagcatgcaggacggcgacacgcccctctgcgataccacccgcgcgcggctggcgcaggcgaccgaattgctggagctggtcaggagtcagagtcgcgtcgtggtcgatccggccgacccgtggcggggcctgtaccaccccagtcgcctcccagcgcgcaacgccgacggcgagatccggtgccatccggacgtgccgatgtgggctgacggtcgcgaggcatcgctgcgccctctgttccttgcccagggcttcgacttggccgtggtcgagggcgagttttccgaagaaggcatcggatcgggcgtttacaacgcctcgcaggaactgcacgactggaatcctgaggcacctggagaggactggcgtctcgtgtggctgggcgaaaccgaggacggactggccgcgtggttcgtgcggcctttggcgatcgccaagcaagaagcggcgagtacgaaccatgaatga

SEQ ID NO: 537291 - DNA, 645 bp, Stenotrophomonas maltophilia
atggctgaggaagacctgacgatcactggcaaagagctagcctcgctgatcggctgcaagccgtcctacgtggtcgagctgcgaaagaagggcagggtggtggtgggggcgggtggcaagggattcctgaaggccgcctccctggagctctacgctcgcaccgcagacccggtctatgccggcatcgcccagcggcacgcagaggagcgtggcagctcgctgctggggagcggggagggtgccaatgctctcgaccccgacatcgatgacgatgaagaggacagcgacgaggacgattccaggccctcacgggccggccggccgcagaccccggattccgcgcgcaaagcaaaggcgctggccgacaaggcggagaccgacgcgcacatggcgcatatcgcgctgcagaaggagctggggctgctgctgcctcgcgcggacgtagaagccttcctcgctgagcacgcaacgacattccggggggcgatggagcgcctggccgatacgctggcgccgcagctagccgccacgctggatgaggctgggtgccggcggctggtctgggatgaggtgagccacgctttggaagaacttagccagggcttccgcacgttggcagccaaggcagcggaggctgcggaatga

SEQ ID NO: 537292 - DNA, 558 bp, Stenotrophomonas maltophilia; identical to SEQ ID NO: 510532

SEQ ID NO: 537293 - DNA, 417 bp, Stenotrophomonas maltophilia
atgacgcgcatcattctgggaggcatcgaccttcctgccgatctccagtggaccgatgagttcaccgcctggcgtatcggtcagcaagcgcgcacgagcttgaccggtgcgttgatcgttcaggaatcggcgcgacaggctggacgcccgatcaccttgaaaacttctcgtgacgggacggcatacgttggcgtggtggaccttccaaccctccgagcccttcaggaaagcgaaagcgaggcgcgcctggcgcccatcaatctcatcatgcccgcgcacaacggcggggaccgccccttccaggtgcgctggcgccgaaccgatggcccggcgatcgaagttgagccgactcgcttcgcagtaccggcactcgatgccgacctcttctctatcactcttcgccttatgacggtgtaa

SEQ ID NO: 537294 - DNA, 336 bp, Stenotrophomonas maltophilia; identical to SEQ ID NO: 509074

SEQ ID NO: 537295 - DNA, 456 bp, Stenotrophomonas maltophilia
atgggagctgtattcaattttaacaccgtcgaccatcacagagccagaatatgttccagaggggtgattcgccccgattcgctcaatatcggcggcaatcgccgccttcacactaacgctatccatcccagccttttcgacgtgtcggaaggcgtgataaacctgattgtccactcggccaaatgtgagcagtatccggccagctttgactggcagtttcaggagcttaagagggccaatacagatcgccgccatcgcaatattgcccggcgttgggttctcacatgcttcgtaaatgcctttgacgtccccgacacctggagtcatgtccgcaacccatggaagcaacattcttgcctgggactcatcgaggggattggccatctcccttgggcttccgataacctgaagcccctgcggatcgatcgagaaggttggccgagagccaacatatga

SEQ ID NO: 537296 - DNA, 273 bp, Stenotrophomonas maltophilia
atggacgaaaccacgcagcagaacgccgcgctggtggaagaagccaccgccgccgcacgtgcgatggaagaacaggccggccacctcagcgaggccgtgtcgatcttcgtggtggacgaagccgaggtcgtcgccgccccgcgcgtcaccgccccggcaccgcgcgccgctgcaccggccgccccggccccggctgccccgccggcccgccgcacggcgggtggtcgcccgatggccaccgaactggccgacggggactggcaggagttctga

SEQ ID NO: 537297 - DNA, 1590 bp, Stenotrophomonas maltophilia
gtggtcggcgtggaacagcgtcttgttggaatccagcttcggattgctggccaggaacgcatacgcatcggcctcaatggtccgctttgcggcacgaccgaaggcggtggccaagccgaggaacgcgcccagatcgtcgttgatgatcgcctgacgcgtcaggttgatggtgttgcccttggtgccggcgctgatggttgccttctcaccgtccgggatcttcttgttcttgaactcgccagcctcggtcagcttgtcgaggttgccgatgctgcccacgcggtagcgcgagtgctcacgaaagtcgctgaccgtgcccgtgacgcaccagcgggaccaggtgtccggcgcgacggcgtaggccgcctgcagtgccttgtgcatcgtgttttccagcagcaccgggaagtcgctgccactctgggtaaaagcgcggcccaccagctccagcttcgccatgccatcggtgcgaacaccgcaacactccaggctacgacgggccaggtccatcagggtcaggccgcgcaccggattgtcaccggtgagcgcgaagatccgcttggttgcgggatcgatcacctgggctcggtgcagcagcgcatgcgtcacagcggagcgctgcagatcctgctcgtcctcggtgacgctgatacggttgatgttgccgccagcagcggcatcgcgctgctccagcgtggtcaagatcaggccacgcacgtgatcgaccgagtgaccagcgcgaatccagccagcggcatgttcggtctggccatggcgggttgccagctccacgatgtcggctgcacgcgtatcaccttccggtgccggtgctgcggccggcgctgccggagctggggcgttgttgatgggttcctgctggaccgccggttcggcggcgcgggcggcgggctgaggcatggtgtgctcctgcgacgatgcgctacgggtgaatacacagggggtcccctgtgcgggttggttgctgcgggtacctgctgccgggtcggccggcacagtgacgaagctgatctcgctcggcgtccactccaccgcgcggtagatcggcaaatcgccggggttgacggcgcgctcgatctcatagcgctgaacggtgtagccaaccgagatgttgcgaatgattccggcgccgatatcggcgattacgccggccagctcctcgcggccggaaaagcgaatctgcgcatggccttcgccattggcgagccaggctcgatccaccacacccatctgagagccgatgccccaggtgttatggctgtccaggaccggcgcagcaccggacgacaggcgctccatgttgcaggccgcctcatcaacgaccagctcctcccagtagtaggtgtcgttccaccagtcgtagcggcgcacgcgcgtaccagcagtccactggagctcgatcgtgcgcgcctcgctatcgaagctggttggctgcaattcggcctcacgcaactgaggtggcatgaggcgcgtcgtaccgtcctgctgtggagcctgggctggctggggcatggtcattcctcgttggttgttgaggcgtcgaccaggctggtccgggcgccactggattga

SEQ ID NO: 537298 - DNA, 654 bp, Stenotrophomonas maltophilia
atgtccaacgcggacgatgacggcccttcgcagctcggctcagatcgcgaccaggtcaccgaccttgggccactgcccagcggtggggtcacccacatcactggtgccacagccttccagactgtcgagccaaagccggcagggggctacgtcgagtattgcaagtttaacgcgcacatcatcactgctggcatcggtgtcccgtacgagtcggccaccggtgatatgcgtgaggtgaacttctccagtgcccgcatccggcagatggagttccgtcgtgattgcgagcagatgcagtggctggtgctagtcccgcagatgtgtaagccgatctggcgctggtttgacgaagcagctgcgcttggcggtggggtccgttccacgggaagcactgccgactggagcacgccgcgctgggactacgtcaaccccaagcaagacatcgaatcggaaatcgcagcgatgggcgccggtctcaactcacccagtgaagcgctgcgtcggcgtggctacgacccggatgcggtgtacgtcgagatgggcaaggacttcaagcggatgaaagagaccggcgccctcggtctgatgactttccttcaatccagtggcgcccggaccggcctggtcgacgcctcaacaaccaacgaggaatga

SEQ ID NO: 537299 - DNA, 195 bp, Stenotrophomonas maltophilia
atgtgctccacgaacagctggccgccggcgaagtccttaaacgtgcgctggttggcgctgtcgcggctggcggtgctggtcagcgccttcttgaccgctgcacagacctcgatcatggggttgagcttctgggcgatccatttgttcatggacacctcgcccggcagcgcatacatcatcgggccgggggcgtag

SEQ ID NO: 537300 - DNA, 222 bp, Stenotrophomonas maltophilia; identical to SEQ ID NO: 510537

SEQ ID NO: 537301 - DNA, 516 bp, Stenotrophomonas maltophilia
atgctgtacggcacgcttgtggccacccaggtcgccgccggcaccgcaaccggcatttccgtgaccgtgggtagcgcggacacgcctgtgaaactgccgcacaacttccttctggccgaccccgaaccgactttcaagaagggcgcggtcgacctggtaaagggcacggattacaccctcgactcggcgcatggcctgctgatcccgaaatccagcggccagctgcaggcgggcgataccgtcgtggcgaactacaagtacgacgcatatctggaaaccgccatcagcggcggcaccacgccgagcaagtccttccagatcctgggcgatatgcaggaccgcattagcggcgacgagggcctgctgaccatcccgaacgtcgacctgaccgtggacggcgacgtggactggttcagcgatgagccgatccaggtaaccctgaccggcccggtgatcttccaggccggcgaggccgatctctacacgttcaagatcgcagcgcagtcggcgggctga

SEQ ID NO: 537302 - DNA, 354 bp, Stenotrophomonas maltophilia
atggtccacctcagtgaccagctaccggaggagttcttcccgggcttggtgtcggaggtctacaacccagtcaagaaccgctttgagaagaaggtgacccgaaacgagccattggacacatgggtatatgcctacgcggcgacccatcacccagaggtccgtatcaaccgcttcacgcgttccgattgggaccttttggaacaacggctggctgcgccgccaagcgtgagcgtttcacgcgaaacgccagctgctgcgtcggaggccgacgcttccactgattcccgtgaaacatcgagtgtgcctcgccggcagcggcccgcgcagcctcgcagcatggggaggcagtggtga

SEQ ID NO: 537303 - DNA, 354 bp, Stenotrophomonas maltophilia
atggtccacctcagtgaccagctgccggaggagttctttccgggcctggtgtcggaggtatacaacccagtcaagaatcgctttgagaagaaggtgacccgaaacgagccgttggacacatgggtgtatgcctacgcggcgacccatcacccagaggttcgcatcaaccgcttcacgcgttcagattgggaccttctggaacaacggctggctgcgccgccaagcgtcagcgtttcacgcgaaacgccagctgctgcgtcggaggccgacgctcccactgattcccgtgaaacaccgagcgtgcctcgccggcaacggcccgcgcagcctcgcggcatggggaggcagtggtga

SEQ ID NO: 537304 - DNA, 351 bp, Stenotrophomonas maltophilia
atgaaaaggttggcagctcagcgaggatcgccgggcgcaatcaaggtggacaacggcagcgagttcgccgggaaggtcatggattgttggacttatgaaaacaggggggagctggatttttcccgacgcggcacgccgacagacaacgcgcttgtagaaagcttcaacggtcgccttcggcaggagtgcctgaatgagcattggttcttgtcactggccgacgcacggagcaagatcgaagggtggcggcgcttctataacgaggaacgtccccacagtgcactaggatggaaaaccccggaggaattcgccctgaaacacgggtcccatgcgaactccagggtgccctag

SEQ ID NO: 537305 - DNA, 267 bp, Stenotrophomonas maltophilia
atgaagaagtcgcgtttcaccgaggagcagattgcctacgtgcagaagcgggcggagctgggaacggcagtaggcgagagctgcaggaaaatgggtattgccgaggcctctttctacgtatggcgaaagaagtatggtgggcttggcctttcggaattgaaacgtttaaggctgctggaagaggaaaaccgaaagctcaagcaattggttgctgatctcagcctggacaaagccatgttgcaggaggtggtcacagaaaagctctga

SEQ ID NO: 537306 - DNA, 1251 bp, Stenotrophomonas maltophilia
atgcctcgtggcaagattccaaccgatggggcgctggtcgtccgtaatagcgtgtgggcctgcgttgtacgaaggctgcatggcgatcggctgacttgggatgaccttgatcagtcgctcttgcccagagttgggctcgatgtacacgcccaagcggcgaacggtcgtccccgatccttctaccggatcttcagcaaggggcatcatccagggaggctgcgcggccctggtggatacttgatcgactcggtgcatcgggatccagcgttcgcggctgcaaaggaggcctttgagcatccgatctggatgatctgcggcgcaggggctcccactgcggagcagctgcgaggcgtacgtcgatcgctaatggagcgtcttgggctactgatgccgtccattactgaacgcctggtggcttttcatcaccaactccctggcttcagcagctatgcgcctagtcgagtagatgccttggagtccatgtttaacgtggccgaagttggctccttggacgcgataggcctgtgtgcgtgcaattatctgttggccatagacagcggtaggctcgagactgcaatagatgtccgggacgcactgcgatgggcagttgttcgtttttgtgctgtttggggattgcgtcccgacgcatgcgcgacaatccagctgttgatggagcagcgggtggtcaggctccggcggggatcgctcttgccaaaggatgttgggtttccactcggccaaacggagtccggcacacttggtggcaatctggcgagtggtgtgttctttgaagatgactatccgtgcatgcttccggtaactccgcggacgggcggggcggaggcattcttcgcccggttccacgtgcactatcttgccttcgtggaagatcttgcaaggcaaaggatggtcgagcagcaggctgagtctgatctcggcggatcttggccgccccaggacgctgttgatgatctgtttcttggcttgctggacgtgccggaggatgtttgtcacggtgaggtgacaactctcacgcagtttgcgttgatcagcccagtagctgcatgcgtggcggaagttctgcccatttctagcgagggaagttcctcctacgcccgcatcaagcctctgggtcgggagcttttgggggtccggcagtctgttgaagtgctggttgacgttgagcatccgcgtcccatggttgggatgctgggagttgcacctccaggatctcccgtttccttggagtag

SEQ ID NO: 537307 - DNA, 1041 bp, Stenotrophomonas maltophilia
atgaaatccaaagaagaaaagatgcaacctgacttgctctaccgctaccggccgttgggcgagaagtctttgttcacgcgcgagcttgacgcgctggagaaaagttatctatatgccccacgatttgaccagatgaatgatccaatggaggctctgttcgaggtggcaaccgcagacgatgccatggcgattctactaccgccaagcctagtagccattggcacccgcatccttgagacaactgcaaagatcgccaaggaatcaggcttgatttcgatgtcagttaaccagctggactacccgctgtgggcctactacggcagcagctttggtggcatgtgcctagaattcgatactgcggaactagagatcggattgctaagccgtgaactcctaatgaaggtcgtctacgactcgaaggctcctaacccagtgagcttccagtccctagcatttgccgatcctctgctactcgtcaatagacgactgacccagaagcgcgaggagtggcgacatgagaaggaatggcgctatctggctggccagcccggccccaaaccacacaccgacaccgcgctcaagtcaatctatcttggcccccgcatcagatccgacgaaaaatcgcgaattctcgaagtcatggcccgccggccggttgctgtctacgaggggatagtggacggctacgacttaaagttccataagatcaaggccgcgacgccctggagcgaatgcgatcgagtaggctcaggccactacaatcccgatgagtcactatcggccgaagatgagcttcgtaaggcacttggatcaaacttcgaagcgctgggacgaaagtgcaaggaactgagcgaacacccaaatatcgagagcatagatgatgtgtatctgacgagctctggaagcggtgtatttatcacaacgacgtacgctttcagggacggaacccgtagaccgcatgtccactactttgatgcctcaatgaatccgatcactaaagaggcagcccttttgaaggtgaccccggcgggggctgattga

SEQ ID NO: 537308 - DNA, 519 bp, Stenotrophomonas maltophilia
atgaactacgaagagctgaacaaagcatggaaaactcagcgcgagcagtacctgctgtgggaaaggaggctaatgcaccacgcccaggaagtatgcgaccactttgaggaaaagctcagacttcctcaggcatcctggaccacatatgacggaacggaagagcgcccctatgttgagctcgttgacctgtccgacagaagcaaacccaaaaggggcgcaccgagtaacaaatcaataaccgatgaagggactctagtcttcggcatcggcatcatttttgaccacggcccagattctcaccccaagcgcagcatatccatcccaattgcggttcggtacaacaagatgaacccggagtacgcagttcattctttcgaaggcgaccagcccgctgaatcctgggtccaggatatggatacgctctattcgaacgctacgaaaaagctgcatgagtacctctctcacgaccctcacaacggctttgccaagcaagaaagagccattggattcatcggctga

SEQ ID NO: 537309 - DNA, 492 bp, Stenotrophomonas maltophilia
atggaatccccatttgcttcaaccatcatcgccggactactactgtcaaccgccatccaagcctcggcctcgccttgcacactgtcgaccctcaccatcgatgcgagcaagaatggaatcgcccgagcgcacatagtctcagacctcaccaagaccaccaccttctatgaaggctcaccctatcaattcgtcagcgcggcagtagttcgggtcgacagcgatggcgtgaagcttgatcaagaggagactacgacatcgatcgatgtgggcttcaggggcatcaccaactgcttcggagatcgggtcctcatagacttcagtcacacagatctgatcggggtgcagacaatcccccttgcgctgattggaacctcctcccgcccaccaattctggattccttcaggacaacgatgattctagagggccgatctggctccgaacccgaacaccggaccatgaatggttggacatacagcttccgggcggagtag

SEQ ID NO: 537310 - DNA, 675 bp, Stenotrophomonas maltophilia
atgggtcgaaagatcttcgtttcgtacaagtacgcagatagtcaggttctgcaccttcccgggaatgggctcaggaccacggttcgggactatgtcgatctgcttcaggcaaagttagaagagggcgatcacatcaataaaggcgaggaagacggcgaaagtcttgtctcgttctcggatgaggcgattgcctcacagctgcgcgagagaatctatgacagtaccctgaccctgatcatggtatcgcctggaatgcgcgagtccgcggtttcagagagagatcagtggatgccttgggaaataagctattcgttgaggcataagactcggaacggcaggcagagcggtcccaatgcgctgcttggcattgtgcttccgaacgccgaaggcagctatagctacttctttgaggataagaaatgccccaactgcacctcggtcacgttaagaaccgatcgaaccttcggcatcctccagcggaatgcattcaacacgaagaggcctgaggctggaacctgcacagatcactccggaggaaagacctaccgaggcaatcacagctatatcaagttcgtgaagtggaacgaatttcacgccgactatggcaagcaccttgaaaaggcctacgaaatgcagaagtctattgatgacttcaacatctcttccaccatctag

SEQ ID NO: 537311 - DNA, 483 bp, Stenotrophomonas maltophilia
atgacacgcagagtcttctatagcttccactatcaatctgatgcgtggcgagcggcgatggttcgccagatcggatcgatcgaaggaaatgcatcggccaacgacaacgactgggaaaagatcaagcttggtggcgacgcagccatagcccgctggatcaatagccagctcgagaatcgaagctgtaccgttgtgctcgttggagctcaaacctcacagcgacgctgggtgcggtatgagatagagaaatcttggagtaagggcatgggcgtcttcggtatccgtatccatcgcctactgaactcagaccgggtgccgtccagccctggaggtaatccgttcgacttcgttcggattgatggccaacccctgagcacgactgtacctctttacgacccttccggcaggaacagccaagaggtgtacggaatcatctccagcaacattcagaactggatcgaacgcgccgtgggcgcgcgctag

SEQ ID NO: 537312 - DNA, 609 bp, Stenotrophomonas maltophilia
atgaaggagctgtttctgtccgcaagcgttccggttcccgagcgtgggcactatcacgagacagccaatccatttctgattcaggtggccgtacgagaactgctcattgcaacagtacgtcatcgccgaattgtgtggtgcgggcacccttccatcacacccatgatctgggccatatgcgaagacatgggtgtcagctacgccgatcaagtcactctctatcaatctcggtacttccgggacatcttcccggtggagaacgagcacttcagcaatgtcgttttcacaccagccgtccccgacgatcaagatgccagcctggccttgatgcgggaggccatgttatccagacaagagatccaggaagccgtcttcattggcgggatggatggcgtggagatcgagcgcgcgctactcaatcgattccaccccaccgccagagttctggcagtcgcagcaactggtggcgcagcactagatcttgccgcagcccaatcagggtcaccagatcgctacgatctggattttgcctcgatgttccgcaacttctcccccgatgaccttggcactgatccatcgagtgggccacgcccacggatgcaccgttag

SEQ ID NO: 537313 - DNA, 1146 bp, Stenotrophomonas maltophilia
atgagcagcttggcgacatatgaactcgcagtccttggctaccctagcccggagcagatggagcaactgaggggctacgtcgcccatgcactggaaccatttggacttctgctcggccaagaggtgggttggaccgtgcacgagttcgaattccaaccagctcaatcgcgagcggccgccgctctttactttggatgtgaaggtgctactcccaagccaccttcggtgccggcagccgtccccgtaattccggtggtgagtgaccttgaacgcactccctatcagctacctgacagcctgcgccccatcaatgcgttggcctggcctgttgaccgggtagaacgtatcgcaacggccttgttggagtgcgccggactgctgccacggcaacgaagagtctttctaagctaccgcagaagggaggcgcgcctggccgcgctacagctcttcgacgccttctcggcgcggcagtacgatgtcttccttgatacccacggcgtaccgcctgcggccgatttccaggcaatgctctggcatcgattgtgcgattcggacgtgctggtgatgcttgatacgccaggctactcggaaagccggtggaccaatgccgagcttggccgcgcattggcaaagggtatcgtgatactacgggtccaatggcctgactcgacgccggatcgacggacgctgacgtccagtcgagccgagctcgtgtctgaggagatcgatgtgtctggtcgcttggcggaagaagctgtcgaaagaatctgcctgcaccttgagcgagcacgcagcgagagcatcgcagtccgtcatctgaacctggtcagtaaggtccgtggtgatatcgagaagatcggcggccagttcctcggcactggccactccagctctttacatcttcagctagccgatggaaggcccttggtggcatacccaagcgtcggagtacccacgtcttccacactccacgatgcgagcatcaattgtctggggaagagtgcggccgtagtttacgactcgatcggactgttgccctcatggcaaacccatctggattggcttggtggctacgttcgaggagtcaggtggatcaaagcgtcagaggccgcctggcagctcgctgattgggaggaccacgcatga

SEQ ID NO: 537314 - DNA, 354 bp, Stenotrophomonas maltophilia
atgctgcacgaaagcggatggtcagtctatgttgactggaatgacacctccatgccgagcacacccaatcaggagaccgcccgcaagattcgggagaagattgtccagttggactatttcatcctcctcgcaaccgaaaactcaatggcctcccgctggtgcccttgggagctgggatgcgcagatgggaaaaagccgaacgagcgcatcctcgtggttcccaccacagagcatggtcgtgagcatggaaatgagtacgttggtctgtacaggcgcatcgacagcaattcactcggccacatgcaggtgttcagcccgggatcttcttatggaactgcggtgcgatcgctatga

SEQ ID NO: 537315 - DNA, 1467 bp, Stenotrophomonas maltophilia
atggtcagggcagcaaaaccgacattctccccagagattggagccttcattgatcgttacgtagaagagctcgtcaacggcaatgcctccgtattcctaggcgccgggatgtcaatgagcgcaggcttcgtcgactggaaaggcttgttgaaggatgttgccgccgaactggggctcgatgtagatcgcgagacaaacttggttgcgctggcgcagtatcacttcaacgagcgcaacaaccgcagcgttctcaatcagaagattctcgctgagttcacggaggatcagcaactgacgccgtcgcaccacgtactggctcgcctcccaattggccactactggaccaccaactatgaccggctgattgagaccgctttgacacaggagcatcgccgccctgacgtcaagttcacagccgatcagatgaggcagagcaagcctggacacagcgcaatcgtctacaaaatgcatggcgatgtggagcacccagaaaccgcaatcctgacgaaggacgactacgaaggctacttcagggagcatgaggccttcgttacggcactcagtggtgatctggtccagacgaccatgctttttcttggttttagcttcaccgacccgaacatcgactacgtgctcagccgtgtccgtgtgacgctgcgccgaaagccaaagaaccattactgcgttctttgtcgcctgcaccgcaaggcacgcgagaagaaggatgtgtatgagtaccggaagcgccagcaggagtatctgatcaaggacctgagtcgactcggcattcaggcactaatgatcgacgagtataagcaggtacccagcatcctgagtgctatcgaataccgataccgacagcgcaccatctttatctccggcgcggctcacgtcttccctgaacgttgggattcgactcgcgcgcaccagttcctggcaggactgagttctgccttaatccgcaagcgactgaatgtggttacagggtttgggctgggtgtcggaacttcggttgtgagcggtgctctcgagacgatcttgagcaacccagctcgatatcaggagaagcaactgcaagcgagccccttccctgtagctaccgatccgcgcgcaaggcgcagtctctatcgacaacatcgggagaaggtactaggcaagtgcggcattgccatatttgcattcggcacgaagcttgaaggaaagaagacagcccagtcccagggtatgcgtgacgagttcaatattgcctgtgctgacggcttgatcgtgatcccgattggggcaaccggcagcgtagccaaagatctctggaatgaggtctcttctcgattcaatgagttctacccccatgccagcagtgctttcgcgagacatttcaagacactaggcaaagacgaagcaacgccggaacaactgactcgtgcattgacaagcatgatcgatgagctgaagcgtctgcccatctaa

SEQ ID NO: 537316 - DNA, 621 bp, Stenotrophomonas maltophilia
atgcccggccgctttcaggccaagctgtgtggtgatgcgtgccagcagcgcgtcatggtcgtcgtcgctctgcagcagcgggcgcagcggcacgccgaactcgccgaacaggcacagccgcaggtcgcccttggcggtcacccgcaggcggttgcagcccttgcagaagtcgcgcgaatacggggcgatgatgccgatgctgccgcgatggtcggggtggccgaactcgcgtgccgggccggcatcggccgcgcgcggacgctcgtgccagccagcggccagcagctgctcgatcaccacgtcggcacgcaggtggtggcgctggaaataggcttcgttgtcgccggtgcgcatcagttcgatgaagcgcacgctgaaggggcggtcacgcaggtagtccatccactgcggcagctcgtcgtcgttcaggccgcgcagcagcaccgtgttgagcttgatcgccggcaggccaagtgcctgtgccagggccaggccctgttcgatctccggcaggcggtcatgcccggtgatggtcttgaagcgttcgcgctgcaggctgtccatgctcacgttcagcgcggtcaggccagcccggtgccaacccggcaggcgccgcggtag

SEQ ID NO: 537317 - DNA, 828 bp, Stenotrophomonas maltophilia
atgggcgtcctctcagatggcacccctttcctaagcggtcgcggacttgcccgcctctgcggtgtccgccacttcgtgatccaggaactctcctcggaatggaacgaggcggtgcagaagccacgcgtttcagcgatcaagaagatcctggaatcaaagagcgttagcctcgtccatccctatgtagaggtcatcgacaagggaaccaccttctttgcctatcccgataccttctgcctagctgtacttgagtactacgcgtttgatgctggtgccaacgtcaaggagcaggcccaagccgcgtatcgtcagctcgcaggtcaagctcttcgtgacttcatctacagccaagttggttacgatccaacggcgctggtgcctgatgtatggcggaatttccacgatcgcgtgtcactcacttacaactcggtgcctgctggctatttcggtatcttcaaggaaatggcggacatgatcgtcaaccttggacaagccggcctgcatatcgacgcctcctttgtcccggatatcagcgtgggccagcattggagcactcactggcgcaacaaaggctacgacggacaattcgggccaagaattaagttcgaacacaacttccctgagtactaccctcaagcggcagctaacccacaggaaccgtggtgctacccggaagctgccctcggagagttccgtcgctggattcgagaggactacattggcgcgggcaagttcgtgcgatacctcgagggcaagatagctcagaagcagttgcctccttcattcgcacagatcgccgctgcagcctatcggattgagcaagactga

SEQ ID NO: 537318 - DNA, 615 bp, Stenotrophomonas maltophilia
atgagcatcctcaacgttctgatcagccgtgaccagcttgtcgttgcagtggatacgcttgcggaggatgcgctgactggcgcccactctgccggtgccaaggtgctcctgataccgcagcacaatgtgctactggctaccagaggtggagcccagttcttcctgaagatctacgagctggctctgcaggctagcttccgggctgacttctccattgagcagctttcggccgagatggggcctgtaatggaccagctgtggttgaactatgagaaggcggccgcagatgctgacctgcctatcgaacagttggggaccgagattgtcctgggcgggtggtcgcccagaagcggcaggatgatggccacggtttatgccaagagcgacagccggcaggctacggcagtgcagccgatcggcggccagtttgcatcaccaggtgatccactcaaaggcgtggcgccgagcatgctgcaggtcgacttgatgacggcgggacggctccaggcgagctacctcaacgagcagatgggccggcaggtcgctggcggccgtctgctgatcgggttcttgcagcagggccaggctgtggtgaaggacctgggaccgatctga

SEQ ID NO: 537319 - DNA, 594 bp, Stenotrophomonas maltophilia
atgcaatcaaatacgaacaaatttcagatggcaaaacgttatgcagccatgaccttgcctctaatgataaccattgtaatcgccatcttcggaatcaccgatacaatcaactcgctacgcgatagccaggcagaagcgtacagtcttagccagaagaacaaggattttgaagatgccctgcgcctatccttggaaacccgtagaaattttaaggatctagattctgcctacgcagaacttctgaaggctagggagccctcccctaaagatccaaccacacccgaagaaattaaaattgcctacgagggtcttatcgcggatcagaggctaatgaccaagagactcagcgccattgagtccatcgtaatggaaagtcctgaaaaatccgtagcgctgcccattcttaagaaggacatggaaacgctaaccgagcgcacgaaggactacaaggaatccatccgcctagagattgaccgcctgtattcggttctgctgtggatcgccggcctggttgcatccatcattattactctaataggttggatcgtcagcgagatcataggtcgtcgcaagactgccaccgccggcgactag

SEQ ID NO: 537320 - DNA, 402 bp, Stenotrophomonas maltophilia
gtgagccgggaaatcagccaagctatggcaagctgtaacggaggggagcttgcgagtccgtcgaaggccatgaaggcggcccctgtggctgactgctcggccggcgagcgcacgggagcaagtgtcgcctacgtgtcggtcaaggatgatctgaacgctccagccttggaggctggcgacattctgttggtcgatctcggtgttacccgatggggatatgacggcgtctacgtcgtagatatcaacggagaggctgttgttcgctttgtacaggaccgaggcggtggaggactttacgtgtactgcctgtcgctcatggatcaagggcaagtgctgccgcgcgagtcggtgtccattctggctgcagtcaaagccgttacgaagatcaggagggtcgcgtga

SEQ ID NO: 537321 - DNA, 216 bp, Stenotrophomonas maltophilia
atgcccgctacgggtgatatccacgtcgtccacaacgcacgcctgggcgcctacgtggcctaccagctcacccaccagaatacggaggacggcagcttcgccgtccttgcactggactgggtgggcagtgccctgccggatgccgccgccgttgcagccatgcaacctgcccgcttcagcccgttccgtgcggcgcccgcgatcctgcaccgctag

SEQ ID NO: 537322 - DNA, 195 bp, Stenotrophomonas maltophilia
atgcaatgctggctgaccgggtttcccctggcagaaggcgagccgcaactgtacggcacgcagatgacccttcagaacggcgtgtacgtgctgcagcctacctccgatcttgacggtctggacaagcgtcgatcgcagatggcgcttggcccttatcaggcgatgctcgatagtgccaacgccagtcgtccttga

SEQ ID NO: 537323 - DNA, 678 bp, Stenotrophomonas maltophilia
atgccgttccttcgcgtagcgcacatgcgcgggcgtatctgggtgctggagccgcatagctgtcattcagtactccggcccagcatccatctccgggtcgaagcagcccccggcctgtgtgaaccatcggatcgcctcttcaccctcggcctcgtactcgatggcaaacggcatcggcggacgatgcttctttctcggattcatgcttcgaaacgcggcatagccctcaagcacagccagtatctgaagccgcgtcaacaagataacgtcctgggggttccatcgcgagtacaccaggaagaaatcggctatccgaaggacagcatgtccctccccacaatggacgcacgtgctgccatcgccaccatttgtaggcgcggcaaaggcgctccgggtccgcagttcgctatcagggccgagatggccgaagtctccatccagccacgctgcgatttcaccgacaccccgtccctgcccatggcggacgaccggcgcgtcaccgatcttctcttctccggaaggaacgtggcaatcgccggtccagtaggggaaaagaactgcacggatagtcattcgaaacccattccctggtgccgcaacggaaacccctgtcccacttccagtctacccaacctgatcaaagatcacgtcaatcacgcctgcccgctcaaggcgtga

SEQ ID NO: 537324 - DNA, 447 bp, Stenotrophomonas maltophilia; identical to SEQ ID NO: 512131

SEQ ID NO: 537325 - DNA, 240 bp, Stenotrophomonas maltophilia
atgtttgcaagcgagctgtgcatttacctggacgaagcctatttccagggccatgtggccacatcgacggatggacagcttactgcgatcacctcgcgcagccttgccgacgaatgggggctcgaacttccagagggtgttgaggagcgaggcctgagaatcagcatccccgccgacgatgacgatgaagaattcgagggtgagcactggtacttcggtgaggttgccgaccggcgttaa

SEQ ID NO: 537326 - DNA, 999 bp, Stenotrophomonas maltophilia
atgtcggaaacactgaacatcgcggaagttgcatctaaaatatcgaaagaaattttcatccgatttggctggcatgcacagccgcgacaggatgacaatttcgaatgccttgattcatctcataagggtgggaagtcaaaggacaaagagaagaagctgcatcctacggacgtcatttttagctatcaagacccgtacgcagatcgaagaatatatctcttgactgacttgaagagttacaaggccgactcaataaaatacggaaaaattcgatcagcgcttcaatctttggctatgagcgttgagtgtgcgcagcactccgctgactggaagacgaaatttgcgatagatcagggcgaatcccatgatgtgagaggattgctctttgttcacaaccatgacggtggctacgcgaaaaaattcattgaagaattgaagaaggtaaatgtcaggacgcttagtatgcgtgatggcgttactcttcattactttgggccggatgatatcagcaggctttacagaattgcagtcgacatcaagctattgatggctgatggagaaatgagtgctggctacacattttattatcccgatctgatgctcgcgcgtcgatctggcggaatgtgggatcagcaggcgacagtcgaggttctggcaggaccgtttgtcgttgttcgttatccctcaaccgatgttgtatctggtgggtacgttatctattacaacagggctggcgggacgcagcaggaatttgaatatctcatagactgcctatcgagatttcaggtccttgagtcatgctcaaaaatcgtcatcagaatggctggtgacgacgttaatgatgactataagtcgaacttccatggggcagttcagaactatgcgcgcgcatggggttttgattcaacccgaaaagcccagctgagttcaatatttatagacagaattcagcaattgagatctgcatataatcctggtgactgtggatggagggattaa

SEQ ID NO: 537327 - DNA, 1059 bp, Stenotrophomonas maltophilia
atgggaactggagcaatgggcccctctgtctactatgtgacagacaaaaatatctttgatgctcttaatgagcacaaagtgactgaggaaataatgtctgaacttctctcctatcggaacacaatcgttagtccgaacgagaaaaggctcgatgtgtcacggtatttctctcagttgacgcatgattattttgacaatcaaagaatcgcatctgtgctcggtgtcgcttcgcggcgggagcgcgtgaccgctttggttgtggaggcggcaatcgacgaggcgggattaagaaaagcggtggactcagttgctgagaactataggaaagctggtgacttggtggcggtcaataagaagccgagtggcttcaatgtctcacttcagtattccagagttgactatagaaggagcgagttcaatcaagtgcaggttagggatgcggatttaagtttttcgctagttgagggtggcgtagaagttagaagtacacaaaatgactatgtagataaattcagggatgaagttgtctttgccatgcgtcaatctgactcgggcctggttagaaaggatattactctttccggacatataagtgcctctgttcgctcaaaattcttccatgacctgtattccgatctccctggatttagttttgtcgacgtgactgatatgtatgtctatcggccatcgagcaaggagggtgaggctgcgcccgaggtcgagagagtcgcgcttcgcggcaatgcagttaatagtacgaaaatcttctccgatcttgccactgacggttactacgtggttagagttatctggacggcaaaggaaaagggtaatggcaatgccctttacacaattgaatcactctttgtagatcccgagagctgttccgacttttcgtacttggcagttggcgtgcaggagcttactacgcaactaacctacaagcgtaggcgaacgccgacgcgttctgaagctattgctgtttctataggtattgagcagcgagctaggtcgttaatgtcgcagttggccttgcttaaacctctcgcgcaaggttga

SEQ ID NO: 537328 - DNA, 687 bp, Stenotrophomonas maltophilia
atgaacgcatacaggtggttcagagttggaagcgctagtggcacagtgtcattgtctgactttagtaaagttgcagatgaagtgaatgatgggcagtggctcgaaatttcaaattcatcatttgaattaatcgaaggtcgattcgttcagcaaagctcgatatatttagagcagatgagtgacaccggggagatatcgcctagcgccttggcagtggtgaggtctatagctattgcagctgtatccagcaatcaattcgtgattgtgagggttgaagatagtcataggatgttttcatccttagtctcctttgttgctcgagggctcgggtttggtttttacatcgagccagtagatctgcgtccactaatcgctgctttgatggacgggggggctggtgggcgaattgctattgattctgcaaagttgatcgccattaaagtcaacggtgctgagccagctaccggtgtttcctcgcgcgtagaaatttcttcaaagtacggattcgagatgtcggtggtcagagatagacttccgcctgatttcgttttgaccagcgcgaagtttgaagtgagcaaagtgggtgtcgttggcggcatagctgtgagctcacagggtaggtgctgcctctctgggaagttgtcgggattcatgctcgaggagatagaggcggcattcatttgctag

SEQ ID NO: 537329 - DNA, 1458 bp, Stenotrophomonas maltophilia
atggtcgacgtaaagatttctggcttgccggccgcagatgcgctgtcaggcaacgagctgctcgctgccctacagggcaccaagaacgtgaaggttctggtcagcgcgattcgggccggaatggcctcggacagtagcgtggttcatacgacgggtgatgagaccatcgccggcgtaaagaccttcacggccaacagcaactggaacctctccgccaatggccggatcgtttacggcgagcctggcggcgactcggcgggaatttcgctgtttcgcggcgcttggaacacaggatctgcgcgacgcggcgacattcgccaacgcacaggcgatctgcttatcggcgtgggcgccaattccgacaacgctccgcccctcaactttgtgtctttcggtcctgcccacgttcgcccaacctctcctggggtgtttaaccttggtacttctggcaacgcttggctcaacaccttcaccgctgagctgactctgaccggggacgatgcggccaaagcgcgcagccgcgctagcatcggagcggttggcctggcgggaaatgaaacaatcgcgggcactaaggtgttctcttccgaagtgcggattcagagcgtcgccccatctttctggctggatgagaccgacggtgctccagcttcggccggcgtgaatctggtggttgatggggggactttccaagcccaagtgcgccaaggcgggtttggcccatacgtacgcaggctgttcaacatgtcgttggacgggagtggcgtcagtttcgatgcagtaacccagccttgggccgacaacacgcacaatctcggtgctggcgggcgccgatggttgaacttgtacgtggtcaacgcgccgatcaccggctctgacaaaacgaagaagaagaacctccgccacatgaccgatgctgaggaagccgcgttcttagagattgcggagctgccatcagcctgggagtggaaagtcggtgaccgaattcacggcggtccgaccgttcaggacgctcgcgacgtgatgctggatcacgacctcgacccctgggcctacagttgcttctgctatgacagctggccggcgaaggaggctgtctggcgtgagtggccggcgcaggaggaagtttgggaagaatggcccgcgcaggatgcggtctacgaggtggtgcaggccacctacgacagtgatggccaggtgctaacacccgaaacccacatcatggtttcgcccgctgttgaagccgggcgacgtcttatcagcgaggccgtgcaagccggccgcgaactggtggagctaggcgtagaggcgggcgagtccttcagtttccgcgtaggcgagctgcacgcatggatgctggcggctatggctcgccgcgaccgccgcgagcgagaggcggccgagctgcgcctggccaacatcgagcagcgcctggctgtccttgagtccggcaagtag

SEQ ID NO: 537330 - DNA, 177 bp, Stenotrophomonas maltophilia; identical to SEQ ID NO: 516926

SEQ ID NO: 537331 - DNA, 150 bp, Stenotrophomonas maltophilia
atgaagggttctggtggaaacaagcacgatgtgcggatggccggcctcgaagagccggtggacgtcgcggacgattcttgcgaattcgagtgtagggtcttgctagtggcgatgatgtggagccgagccatgctcggctgcattcaatga

SEQ ID NO: 537332 - DNA, 4581 bp, Stenotrophomonas maltophilia
atgaatcacatctaccgtcgtatctggagtgccgccaagcgttgctgggtggtaggaagcgagctgaccaatcgtggaagtggtgcgaggcggtcgatcagtggaggggcgggcgccgcactgctgatgttctcggtaaacactatggctgttgaggatgtcgacaaagaacccctggagaatctgcctgagattgcctcgggggagcaggggaatttcccgcagacaggaatgcatgcgggcctgcctacgatgctcattggcctggatagcggagttccacagagatcgatcgcccctcaatccaagtactatcaactcgcgattgtgaacgacgttgcttaccgggattcaacggcaaccggtgatgacactgtcgtggtgggttctcgctccaccatctccggaaaacggtcagtcggctacggaaatggtatccgttcaactggagagcgtaatgtcgccatcgggacgaatgtcaagatcgaacattggtacgccaccgcagtcggtgacggcgcatacgccggcggtggctggggcgctacggcttatggcaatgattcgcgagccgacggtggcaacgcaattgcaattggtagcggctcgcgggtagctaccgggggcggtatcggtggcattgcgttggggggagatgcccgtgccggtaccagtggctattcaggtgccatcgctgtgggcaacaagtccactgcgtcctacgacgcgatggcaatgggctatgaagcaagcgcttccatgtcgggatctgtggcattgggtgtgcgctcggtcgccaacgaggcgaacacggtctctgttggcaacagcagtaccaagcgccgagtagtgaatgtggcagacgcgcgactcaacagcacgagttcggacgcggtgacgggcaagcagctgaatgccaccaatggcaatgtcactgccgcacgttctgtggccgactccgcgaagaccaatgcagacaatgcgctgaacaaagcgaacacgctgggtggattgctgagccaaacatccgcatctggcaatgtccgcctgggcggcagcaacagcggtgctgtgctggacgtccgcaacagcgctaacgccaaccgcaagatcacgggcgtggctgacgccacgctcagcgccacaagcactgaggccgtttcgggcaagcagcttaacgccaccaacagcaacctcacggccgcccgatccgtcgcagacgccgcgaagaccaacgccgatagcgcgttgtcgaaagcgaacacgctcactgggctgctgagccagacgtccgcctcgggtaacgtccgagtaggagcaggtaatagcggtgccgtgctggacgtccgcaacagcgcgaacgccaaccgcaagatcacgggcgtggcagatgccacgctcagcaccacgagcactgacgcggtgtcaggcaaacagctgaatgccaccaacagcaatgtcacggccgcccgatccgttgctgacactgcgaagaccaatgcagacagtgcgctgaccaaggccaacaccctctccgggcttctgagccaaacctctgcctcgggcaatgtccagctgggcgcgaccaacagcggcaccatactggacgtgcggaacagcgccaatgcgagccgcaagatcaccggtgttgcggatgcaacattgtccgccaccagcaccgatgcggtgacgggtcggcagcttgacgccaccaacatcaacgtcaatgccgcactgagtgatgccagcgcggccaagaccagcgcaaacaccgctctgacccaggtgggaacgctcaacggattgctgagccagaccagtgccagcggaaacgttcgcgtgggcgagaagaacagcggcagcgtgttggatgtgcgcaacagcgcgaatgcgaatcggaagctgaccggcgtggccgatggtgcggtcagcgccagcagctacgaggccgtcaatggcaggcagctcaatgccaccaatgacaaggtgacgacggtggaaggtattgccaggtctgcgggcatggaagctgcgttggcaaagaccgatgcggccaaggcgctggctgagacagcagtgctgggcgggctggtggcgcaggtatccgcgactggcaatgtgcgcctgggtgagaagaatagcggtacgacgttggatgtgcgcaacagcgttaatgccaataggaagattagtggtgtggcggatggattgttgagcgcaagcagcaatgaagctgtgtctgggaagcagctgtactcaaccaattcgcgagtattggctctggagggcgtaagtcaatttgtgagtattggtgtggccccctccagcgaacgtgctgatgccgggccagttggcgttgccctaggtaattcggctaaaacggggagcgaaggtgggaccgcagtgggaacgcacgcgaagtcactgggcagaaattcggtggcagttgggcgtgcttcaaccgtgcatgaaggttccgaaaatggcttcgccctcggggttggggccgaggttggcattgcggaaggtggtgcaaggggaggggttgcaattggcgctggagccaaggttgggaaaggggcagatggctcactggcgattggtgaaggctcgcaagccgacgaggctggagttgcatcatttggaagtgcaactgcttatcgccgcctagtgaacgttgctcgaggcaccgccgaccacaacgccaccactgtctcccagctcaaggattccctcgtcaccctcggcggcggcgcaggcatggacggcagcggcaacatcatcgccccgacctacacggtgcagggcggaacgcagaacaccatcgaggatgcgctgacggcactcgatggcgccgtcatcaccgctggccgtcgcgcggacaaagtggaaggtcagctcagctcgatcttccaggattcaccttcggtccgtgccgacggtatgaaccagatcgcgctgaatggcgtgaatggcatggtgctgaccaatcttgccgatggccgggtggcgccaggaagccgtgatgccgtaacaggcaaccagctgtacgccgcagagcagaagatctcgcagaatcggagtgatctggacgcgatgcgcaaggagcgggagatgggtcagcaggcaatgcgtgggttggatgcgagcgtcattgactacggtggtgcgcgtttgactggcgtggccgatggctccatttcggcagatagtcgagacgtagttactgggcgccagttgtttggcgtgagtgatcgggtatccaatattgagcatcaaggacgcttcctgaagatcaatacagatgagctaagtgaagatgcctttgctggcttcttgggcgtggcaatcggcgattctgcaatgactggggtcgacggcggcacggcactgggggcctacgcgagagcgcttggcgatggctctgtcgctcttggtcgtggctcgggcgtttctgccgatgcacctgacggttttgcggtcggcgttggatctcgagtgcactccgcacaaggtattgcgattggccttggttcggtagttgaatcaggtgcagcgggatctctggctttgggcgccggctcggcggctactgaatctgaagttgtttccttcggcaacccgaacatgaagcgccgcctcgtaaacatcgccaacggcaccgccaaccacaacgccgccaccgtcggccagctgcgcggtgcgctctccaccctcggcggcgaggtggatgccaacggcaacatcgtcggcccgcgcttcaacgtccagggccaggcacagttcacattgaacggtgcactggaggcactggatggcgcggtcgtcaccaacacttcgcgcgtggacaaggtcgaaacccagctccgctccgtcttccaggacaccccctcggtccgcgccgatggtgtcaaccagctcaccctcgccggcgccaacggcatggtcatctccaacgtggccaacggcctgatcgcggccggcagccgcgatgcggtcaacggtggccagctgcattcgatgcagcagcagcttaacggccgcatggacggtctggagcagcgtatcgacgatgccccggcaccgcgtgcactggcgtcgacctcggtgccgaagccccaggccgaggaaactcctgtggtgcctgaaggcaaggactcccagcaggtcgcttcggtaggcgagggcgacaagcccacgccgcagccgaaggccaagcaggacgacacgccgaagccgcaggtggacaccgctgagctggagaagatgctggcccgtgccaacgagtacaccgatggggcgatcagtaacttcgaacgccgcctggacaagatggacaagcgcttcaaccgcatggcggcgatgagcagtgcacagagtgcgatggcaatgaacaccgccggcctggccacttacaaccgccttggtgcgggcgtgggctacagcgagggtgagtcggcgatggcggtgggttaccagcgcgtgctcaacgagaagggctcggccaccttcagcctcaatggggcgttcaccaacagcggtgagcgcagcatgggcgtgggtgtgggcatcggctggtga

SEQ ID NO: 537333 - DNA, 1068 bp, Stenotrophomonas maltophilia
atgaccgtgcttagccctcgcaagccggagaaattgagagcaagctactacaagcgaatcttctggctctgtctactgttgtgcccactaccaatgctctcggtgtcggtcaccggtgcgcttgtctggggccatcacgcatcggcgagtgcagcactgatcgccacgggattcacgcttctctcaatgtcatcgattttgagagactgcttgttcaggatatatttctgctccggccgggaggggaatgccgtcgtacttgctctgacgatcgccatcacaacggcaacccttctctatcttcagcacatctccagccagaaacttacctccgcagtcgcagtactgttgacgagtgcaggtcagatttctggtgtgctcgctggctactggcgattgccagcctcaagaaagcatcgacgacctgtcagcgcgcttggaagggacgcagtggagttgtggactggaggaaagtgggctggcatgacggctcttgtgtcgtggcttcatggtcagtcatatgtgtataccagcgcgctgatgattggcccccaagcggtggcctacgcgaatgcagctcgaatatttgcatccccctttcaagcctttctttcatcagtatcccgagtaatgcttccaaaactttcgaagctaagggagccctccaaaatcaccaagattgcggtggtctattcacgcaatttactgcttttactggcaatctactcagtttgctgcttcatggtccaaacagtcagacctgaaatcgcggggccttactcaggacgcacattcgaaattgcgctcgcgtgctggatgttaatccttgccacccaagcgctaaaggagccaccgtcgattgcatgccagtcaatggctaacttccgatctgtgttcacctcgtactgcattgccgcatcgatatctgtaacattatcatttgtgctagcctggggaatgggactagttggcccgctaattgccgtagccgccggcgaacttgtcctcttcgccactctatgggccagactctggaataagagtcgccgagtaggcccgaccccataa

SEQ ID NO: 537334 - DNA, 696 bp, Stenotrophomonas maltophilia
atgccatggcagaagatcagtgacctgccggaccagcgtttcatcggtccgtatggcatcgaattctggcgaatccacgagggccaggtgttccaccagggccggcagctgcgcaaagccgatgcagcgagcttcgagttcattccggcgcactacttcatcggtcgcgacgtgcacgcggtctaccatgcttggacccggcagacctccatcgaccgcgacagctttcgccaatgtggcgcgtactggttggacaaccacgccgtctacttcgagcacgagacctcgctgaaggcgatggccgaggcagattgcacgacgttccgcgatctcggaggcggctacggtgccgatgaccatggcggctggtactgcggccggcggatgaagcactgcctgcgcggcgacctgctgcagacaatcccgcaggacccgctgtacgccgttgacggcagcaacgtctactgcgacgggaagccactgcccggggtggatcgcgcgcgctggcagctgctggatggacacttctcgggggatggcagccgggtctactacctggagcggaagctgccgcgcgtggatgtggcgacgtggcgctggctggaggggagctggtcgcgggatgcgacgcagttgttcaacatgtatctggtcgagaaggaccctgaggtgcgggcgctgtatgggtttgagtga

SEQ ID NO: 537335 - DNA, 426 bp, Stenotrophomonas maltophilia
atgaaccccatcaagttcaagaagatcgccgccgacggttccgagctgccggacactgccaccgaccacgtcgccgtgctgctgcccgactacggcctcaccttcaccgccaccaacatcgtggacagcgacgttccgcacgccgagtgcgagaccgccgcccagcgcctggacctgctcggccacaccgattgggatctgccgaccatcgaggaactgcagctgctgatcgaccgcagccgctactcgccggccatcaacaccgacttcttccgcgatatccagaacgactggtactggtcgaagactccggccgcctggtcctcggcgtccgcgtggcgcgtctctttcagccacggccacgtctacgacgacccccgcctcagcggcgggttcgcgttggccgtgcgtcgtgccggtcagtga

SEQ ID NO: 537336 - DNA, 549 bp, Stenotrophomonas maltophilia
atgaacgccatcaccattcgcaccaagggtgaagcggagatcttcatctccagcgaaaccctccgacccggtcatctgatcgagctcgatgacgaccagtccatcaaccggtatgccaccggccacacgaagctattcgccgacggcaccagcgctgccggcagcgacccgcgcaccgaccacgtcgcggtgatcgaccacgccactggcctcatgtgggcggtcaagtccatcggcgacagcgatggcgacccgatgagccaagccgactgcgagaaggcttgcagcgagctgcgactgctgggctacgacgactggggcatgccgacccgcgcagaacttgccgccctggttgatgacacccgccatgagccggccatcgatacctctctgttccccggcgtgctgccccgctggcactggactagcacgccctgcgcctggtcctcggcgtccgcgtggggcgtctatttcggctacggctacgtctacgacgaccaccgcagcgactacgggttcgcgttggccgtgcgtcgtgccggtcagtaa

SEQ ID NO: 537337 - DNA, 306 bp, Stenotrophomonas maltophilia
atgtgggtgggaaaagccatcacccaatggctgaccgacattaagaagggaacggtcccgaaaagcttggtgtacaagcgtctcgcgctcgagtcctttgcccgtgcggtcggcgagaccacgcctgtgcatgagtgcaccagtgtgccgattggcgcttgggtgtcagagcttcgggcgtgcgacctggccacgcccacggtcgtcaaccggatccccatccacccggaattcaatcggacgggagtcttgaaacacgtcgcgcgtctgtgtgccgcgggcgaagaacgccttttccgaacttag

SEQ ID NO: 537338 - DNA, 267 bp, Stenotrophomonas maltophilia
ttgtccaattccctcggccggcacctctcggccatcctgcccaaacccgagactggcaagctcggttttcacagtttccgcaaaacgctcatccggcacctccatgagcaggacgtcaaagcagagcagcgcgctatgcatgtcggggacgaccttggcggcgagcaccacaagccatactcggacgaagtgccgaagcagcacgtgttcgacgccgccgggaaggtttactatccggtcaagcctcgcacggatgctttcacctag

SEQ ID NO: 537339 - DNA, 1374 bp, Stenotrophomonas maltophilia
gtgccgattaccgcaattcgaattcatggctaccggggattttccacgccaggagagctgcttttggccgtgcccaatggtagtcctggctctggcctgaccttgatcaccggtcccaacaactccgggaaatccacgatccttgaagccctgcgcgcacgcgcaggaggtcagccggtcagcttcactgtagggacaagaaattcagctgttgaatctgtcacgtttgaatatgtggtgggcgacaaaacagagtcgatccgctccctcaccaaggggtcgagcgagacgattcgtgatttcgacgcaggtgtgataaaagttttttcgctgccgtcgcgtcgcgccttcagtccttacttcggtaaaagtgtatataaccgcgaacagttccgaagttcatcaattcttgagccacagcggtcatcgaccctgagtaatttcgaatcccgtctgtttcatgttctttcaaatcccggtgagttcaattcgcttcttgcacggattctcggctatgcccccgaatggacaatcgatcagtctgatcagggctattattttctcaagttcttttccgggaagcattcgcactccagtgacgggatgggtgaggggatcatcagcgcatttgccatagctgatgcgctttacgattcccaagctggcgaggtgatcgccattgatgagccggagctgtcgctgcatcctgcgctgcagcggcgtctggcagacgtgcttatggatcaagcgaaagacaagcaaatcatcgtagcgacacactcgccctacctcgttaacctcaaggcactgtccgctggcggggcccttgctcgcgttgtcacgggcgagaatggaacagaaattcatcaaattggacagcgtggtcgggcagccattggggtgctggtggctgacaatctatccaacccccacatcatggggcttgatgctcgggagctcttcttccaagaggaccgtgtcctgctaacggaaggtcaagaggacgtgctcctgtatccaagggtttttgagcagctgggcctgactatgcctgccacgttgtttggttggggggcgggcggggcaggcaatatcaagcacctgtgcgcagtgcttcatgaccttgggttcagtcgtgtcggtgccctgttcgacgatgacaaggcggcggattgcaccgaagcccgagcggcatttacccagtaccgctttgacatgatcccggcaaaggacgttaagaccaaaaaggctaggaagaatggcgacgaagttgtccccggtctgctggatgagaaataccagctgcgggaggagctgagggcggcagctgagcaagtggtgaatgcgatggtcgactatttcaatgccgggtga

SEQ ID NO: 537340 - DNA, 1599 bp, Stenotrophomonas maltophilia
ttgttggaagcaaccatttacacggggcacggaatggccacgattaggacccactacgacaacctgaaagtgtctcgggatgcccctccagaggtgatccgcgcggcgtacaggaccctgtcccagaagtaccatcctgatcgcaataccagtcccgacgcagaacgcgtcatgcgcctgctcaaccaagcttatgccgttttgtccgatccccaccgacgcactgagcacgatgagtggatcgatgcccaaagccaagtggtagacgagcaacctacgccagagcaagacggatttgaacgaaacgcagaccccaccgaccgcccctcttccagggaccgcgctggtgcaatcctctttcccgctggcgggcgctccccgttcgaccagctccctcccgatgtggccgccggcctgagagagcggcttcgggggcagcggtcggaccaagttctcctccccacggcgtccggccccctggccagcttgatcaaaaccctcattcctctcgccttcattgccgccgtcgccgtcagcgccactgagagccgctggcagagcgacaccggcgagctcctagcttggatcgccgcggcagcgggcctctatttcggctcccaagcacgttacttggtcaactccatccgaagcccgcttagccccgctctcattgccaccccgatctacctcattgagacgtcgtggaatgaggtcgtctactggcccattccactgattcgtatctccaaagcgacgaaccacctgcgtaacggtcgctatacccacacgtcctttgatctggaagctgggcagaagacccgccagttctccttcgactctgaggacggctattcgcggtttgtcgctgtgctttcatccggcctgcggcgctacgtggaagcgtccgagcagcggactgctcgactattccaagggttggacgaactgagtggtcgggagcttgtatctccaaccaagccgttgaccgagccgttgtcacggttcctgtggtggatcgcaggcgccacaatctttgttctgaccatcgggctgctgcatcagcacaacctcacccttcccgcgccgccacctgctcgcggatcgcactactcggctccaacgtccgatgcatcacaacactcccaagcaccagagcagcaagaagaggccgctccagctgtcagaacggaccagatcgcccagcgaatcggtaccagccgtattcccagcagcgctgcctatatacccggggagcccttgcgcaggatgggcggactctcctcggtcacggtagacaattcggggacgggccaggacgtccttgtgaagctcgtggaaatcaacggagtcaacgcatcgcctattcgaaccttcttcatccctgcgggcgactcttttaccgccaagaacatacgcccgggcaactacgaggttagatacgtcgcccggcatcaaccaggcgcgagtaaatcagaggagttttcccttgaggaggtcgatacgaggaccggcaccgagtacagccaggtcagcttgacgctctacgcgatacagggcggcaacatgaggatgcagtcaatccctgacgatcagttctag

SEQ ID NO: 537341 - DNA, 177 bp, Stenotrophomonas maltophilia
atgaaaaccaaaggaagaatagcgttgtcgatcgccctgcagatcaagggattgcttctgcttgcacctgcctgtatggaaatctggcagggcgtgaccttcccaagcgacgcgctagccgcgtcgctcctgatgcttaccggcctctgggcggaaaaaatcgagaaaacagactga

SEQ ID NO: 537342 - DNA, 816 bp, Stenotrophomonas maltophilia
gtgccgagcaagctcggcacctacagaaaatgccgcctgcaagggcggcattttcgttccggcggcgtggctttcggtagatgccgaccttggtcggcgccgtttggagaaaccgcgaccgggagcgctatcggcgtgccgagcaacgctcggcacccacaaaaatgccgcctgctagggcggcattttcgttccggcggcgtggcttttggtagatgccgaccttggtcggcgccgttcggagaagccgcgaccgggagcgctatcggcgtgccgagcaagctcggcacctacagaaaatgccgcctgcaagggcggcattttcgttccggcggcgtggctttcggtagatgccgaccttggtcggcgccgtttggagaaaccgcgaccgggagcgctatcggcgtgccgagcaacgctcggcacccacaaaaatgccgcctgctagggcggcattttcgttccggcggcgtggcttttggtagatgccgaccttggtcggcgccgttcggagaagccgcgaccgggagcgctatcggcgtgccgagcaagctcggcacctacagaaaatgccgcctgcaagggcggcattttcgttccggctacgccggaaccgtaacgctacgcgttactgcttcaggggaatcacgcggatctcgacgcggcggttcttggcgcgaccggcatcggtgctgttgtcggcaatcgggtacgacttgccggcgcccagggtttcgatgcgcacgctctgcacgccctggccgatcaggtactgcgcgaccgagtcggcacgttccttcgacaggcggttgttga

SEQ ID NO: 537343 - DNA, 441 bp, Stenotrophomonas maltophilia
atgaattttcaagaattctctaatcttgttgccaataaaatgcgcacgaaccctatctggtttcaattggagagtgattcacccagcagcagagaagaaatttctcagctggaggcgaatatcggcgcacaattgccggatgaatacaaacagttcacaaccaagtatggcagcgggtactttgctttcgggattgtttactcgcctagccttagtagcgcctttccattggaaaaggaaaatctaacaaatcaagccattcgaaagaactacataatattttctgaaaacggatcaggcgattactacggatttcggtcgacagaagaaaaatgctcctctgaagtatttttatgggaccacgagtcggaagaatggagtgagacagagcacttcaatctttttgcattccttgcctcaacagcgctcaacaacagatga

SEQ ID NO: 537344 - DNA, 501 bp, Stenotrophomonas maltophilia
atgggttatcgcgacaggacatacgtgatattcgatggcgacaaggatatgtgggcatatgcctacatgcttgggtgggttaaaaatgagcgaatggggttcgacttcctcgacgcgcacgcaatccggcctatggagcgtgcggccagtgaggaatatgtaaagagaatccttcgagagagactttcggctacaagacaggcgatcgtgctggttggggaaagtaccaaaaatttatataagtatgtgcgttgggaaatagactcatgtctagatatggatataccaattgtcgtagttaaccttaatggtaagcgagtgatggatggcgatcgttgtccgccaatactgcgcgggacgtgtagtattcacgttccctttagtgctagagcaattgagtttgcgcttgatgatttctgtgatgggtttgccaactaccgtaggaacggattgattgacctttatcttactcaggagtcgtatcggcgaatcggactatga

SEQ ID NO: 537345 - DNA, 867 bp, Stenotrophomonas maltophilia
atgaaagaaggtgattttccatcgatctacagagcggccgacagggcagctgcggaggcgcagaggaatttctttgcggcgcttgggttgaactatttctttctgatcgcggcggcggctttgtcagtagcgaatgtgaagagtcagtccttcgctgttcttcagatcattccattgctggtgacactatctattacaatttacttgggaagtaagcagcctcagagggcttggtatggtgcacgtgcattagctgagtcaataaagacggtggcatggcggtttatgatgagagctgcgccatttgatggggacttggcgcgcgcggagcttagatttaaagatcatctttctggaataataagctcaaacaagaggatatctgaagcttcacttgattgccacggcggggatcagctgactgctgggatgcaatccgttagggctatggatattgatggtcgcctatcgatatatgaaagtaatcggattggggatcagcatgcctggtatgttgcgaaggccgcattaaataagaaactatctaggagatggttcgcggttctaattgctgttaattctctggcgcttctgtttgcgctgggcaaggtcttgaatcctgttggggagtactggcctgcagacattcttgttgcaatggccggtgccgcaatggcgtggacgcagagcaagaggttccaagagttgtcggctgcatattctctgacgtcgcatgagattggattgctgcgtattggtctgcgtgggataaagtcagagaagggtttttcaaaatttgttagtgacgctgagaatgcgttttcgcgtgagcatacacagtggcaagcgagaatggactcggagtga

SEQ ID NO: 537346 - DNA, 1020 bp, Stenotrophomonas maltophilia
atggcggaggatgtgcaggtgggcgatagcggggattcttcgtcaatgcgaacaaataatccatttgtttttattagtcacgacacgcgcgatgctgagctcgccgaagcttttagtaatctacttaagagtgtgagtgctggggttcttaagtcgtttagaacctctgataggaggggtaatcagggcattgagtatggagttgagtggtaccctgagataataaagagtattcaggcggcttctgatgttgtttgtctcttgactgagcggagtgttgatcggccctggatactctttgaggcgggtatggcaaagggcaagttagatactccgatactgggtgttgctctagggattgagttgaaagcagcttcgagcgggcccttcgctcagttccagaattgtgcggatgacgaagagtcgttgaccaagctggtttttcagttggtgaacagaattcctgggtctgagccggatagggacactattagattccaggttggaaaatttaaggctgctgtggatgagataattggcaagctcgcattgcctgcttcgcaagagaaaaagaaggcggccacagatgatgaaaattcttcagcgaaattgtttgaagaaattaaaataatgtttcaagatttgccgacgcggatgccagttcgcgaggtcgagaggtacaataggccagagaggattttgcctctttcagaggcggttgagcttatgtatcggaggggggatttttcgcttggtgtgcgtgtcgcccttggtgtgtatcgaaaccacctgccctgggtctacgacgagggctgtgctctaattaagaagcttggggcctcgaattcgctcccgtataagaagaagtctttgattgcgttcgaagatcttcttatttccagtgttcgaaatccgtactttgaaatgaaatttaagggggataaagaagagttctatctcgcagcaaaagagctgccttcaatgctcatgcacggatttcacgaaattggaagattttga

SEQ ID NO: 537347 - DNA, 435 bp, Stenotrophomonas maltophilia
gtggcgcacagcctgttcgtcgatccgctggcgttgatcgtgcatgccgaccatcctgccctgcgcagactgtcgaagcagggcacgctgtcgctgcgcgacttcgcgcaggagccgttcgtagcgttccgccgcagtgccggtgccggcatccacgaccacatgatcgcgctgtgtgcggctgccgggttcactccgcgcatcgtgcaggaagccggtgaggcatcgacgctgatcagtctggccgctgctggcctgggtgcggcgatcctgccgtcgtcctgtgatcacatccgggtggaaggcgcgcgcttcgtggcgctggccgatgccggcgcgcattcggaagtgcagctggcgtggcaccgcgagggtgtgacgccgttgatccgcaatttcgccgggctgctgcgtgaagcgttcgccgaagggtga

SEQ ID NO: 537348 - DNA, 807 bp, Stenotrophomonas maltophilia
atggcccgatgcgcggttgagggcggacgcacgaacatccggcacgcctgccagaccttcgaggtcagccagacctgttatcgctaccaggccagggccagcgaggagaacgcccggatcgccgactggttggtccggctgaccactgcgtacaaggattggggctttgggctgtgcttcttgcacctgcgcaacgtcaaaggctatggctggaaccacaagcgcgtctaccgcgtctatcgggagctggagttgaaccttcggatcaagccgaagaagcgcctggtgcgcgagaagcccgagccgttggcggttccggatacgatcaaccaggtgtggtcgatggacttcatgcacgaccagctcagcgacggccgcaacttccgactgttcaatgtgatcgacgacttcaaccgcgaagggctggggatcgagatcgacctgtcgttgcccgcggcccgtgtgatccgttccctggagcagatcatcgaatggcggggcaagccgtgcgtgatccgctgcgataacgggcccgaatacatcagcgggacactgctggcttgggcggagcagcacaacatccgcattgaacacatccagccgggcaagccacaacagaacgcctacgtcgaacgctacaaccggaccgtgcgttacgcctggctcgcccgaaccctgttcgattcgatcgagcaggtgcaggaaaaggccacccgctggctatggacgtacaaccacgagcgccccaacatggcgctcggcggcatcacgccgatgcaggcgcgcaacaggcgaatgtccggttaa

SEQ ID NO: 537349 - DNA, 267 bp, Stenotrophomonas maltophilia
atgaagaagtcccgtttcaccgacagccagatcattgccgtgctcaagcaggccgaggccggcacgccggtacccgagctgtgccgggagcacggcatcagctcggcgacgttctacaagtggcgcagcaagttcggcggcatggacgcgtcgctgatgtcccagctcaaggagctgcaggacgagaaccggcgcctgaagaagatgtacgccgaggcccagctcagcgccgacctgctgaaggaggcgatgtcaaaaaaatggtga

SEQ ID NO: 537350 - DNA, 705 bp, Stenotrophomonas maltophilia
atggttggccacccagcgcttgagggcttgatgttcggcgctctctgggccgcctccctgctggaccttggggagcggaatgacgcgctgcgcctcgttctgaggcttctctccagcatcaggctccacaacgggggcgcccaaggcgcgggcaaccctgtcccagtgtgggtaagtgaagacatcctgcttggcttcttcaaactgcgccttgcgatcttcttcggtcgccatgggcttgccatcgaaatacgccggaacgatggtcaccgccccatcgcccggaactcccttgttcttgttgatcacgatggcatgcaagggaggaatgggttccccccattgcttgctcaaccattcgatggcttgcgccaccccacctgccacccgcccgtagttcaggacgtgcttgatggaatggccgttgcggtcgtggagctcacgcgccagatcggtgtaggtgtggtcatcgccttccttggcccatcgcagcaggataggaagtgcgtcaggcacaagcggccccagcttctcgctctgcgccaacggaatcaatttccagctgaacttctccatcccctacccctcccttgtcgtcccgccatggtagcggcgggaccagcacgggaaaacgatgagggccggtttcccggcccccctttctcaatcctcgttgggcagcatgacggtgaccaccggctctag

SEQ ID NO: 537351 - DNA, 852 bp, Stenotrophomonas maltophilia
atgattggtcgcatgttgctttggcttttgttgctgcccacaagtacctgggcagcaactttaatagatgcccaactgcgagagatggatcgggagatgttggtcgctggcgcatcaggccgcatcgagacgttggcggatgcctactcgtcatgggagtcttccagaccatctgggaacagttgcggcagtctgagcgatctggatcttgaggccgcgttccgcgccagcttctacatctcaaggtacgttggagatgaggaatggcttggcaaggtccgatgtattcatgaggagttgaggcggagaggtgctgctacagagacaatacataggaacatgcactcgcttcttgttcaggttcgacggtttgccgaggccaatgagctgcgtgaaatggaggcgctacgcgtagatgagcttcccgagatagagcggaatgcacctgacaagcagggaacactccaccatctggcgagtggacagctcgagtggcgacgttgggcgtacaaggatggactggaagtgatcgcctacgtcagtccggcttgcgctccttcccgtcgggccatgcacgtcatcttgagcgagcccgaatgggaatggatccggtcccatataagatttgttgttcgccggtcccctgcgtggccccagtttggtgtcagcgagtggaacaaacgcaacccatctcatcccatgttgcttcaagcggggccagaaggctggaaagagctggatgtgtatgaaactccagtgtttcatgttttcaggaatgggctacgcctgcgcaccctgacaggatgggcagacgccagtgatcacctgatgagcctgaaagagagtttctga

SEQ ID NO: 537352 - DNA, 501 bp, Stenotrophomonas maltophilia
atgaattccacgatgctcgtcgttctgatctcggcgatttgtctgtccacatccatgcctgccgccgcaggcggtagagggaccgatgccttctctgcagagaatgtctcgctcatgcatgcccctgtgaattcgctggggcggcttgatcttcacctgatcgagctctctcccgaatccccactgatgctgctttcgccgcttgcgcgcaagcagttcgttgattcgctcgtgtttggagatcggggactggccagcttcaactacgatcccattgtcgctgaattgagcgcgagtgaagcttaccggctgctggctctgttcggcgcgcagcgcgcaatcacgtacattccggggttgcagcgcgcttcgaaagcggatgacgtggttgtgcaatctgtcaatccgaacccagtttttgaagactatccgggctatgcctgttcagatcgcgcgacctgttcgagctccatgagcagtatctgtatgtcgagttgctga

SEQ ID NO: 537353 - DNA, 1029 bp, Stenotrophomonas maltophilia
gtgtccgatgccacccccaacgaaagcttccttcagcgccactcccgcgacgtcgtcgaacgtttgatccgccaaatggaggagggcaccggtcccttcctcaagccctgggacgcccgcgtggacctcgggttgcccatgaaccccacgacgggcaagagctaccggggcggaaacctgctccacctatgggcccttcagagcgcgtgggacacccaggacaaccggtggatgacttacaagcaagccgcggccgtgggcgctcaggtgcgcaaaggtgagaaggccagcgtcatcgaatactgggattggtcaccggtcgaagaggccaagaagagcggggacccagagctcatcgccaaggcccaccccaaggtcttcttcccccgcgtgttcaacgcgatgcagatcgatgggttgccggcgttggtcctgccacccccgcgcccagagcccgacgtccatcaggcctgcgaagcggtgctcaaggacagcagagccgagatccaccacgacgggggcaaccaggcgttctaccgtccgatgacggacagcatccacttgccccagcgcaacaccttccactcggccagcggatactacgccaccgcgttgcacgaactgggccactggaccggctttcccacccgcctcaaccgcgatcagaaggggacttttgggagcatcgactatgccaaagaggaactggtcgccgagatctccagcatgctgatgggcgaacgcctgggcattggccacgaccctacccagcacgcggcttatgtgaagtcgtggatccaaatcctccgggacgatccccgggagctcttccgagccgcggcggcggccgagcgggtggtggaattcctgaaggtgcccgagttggttcgcgagccgctcccgaaggttgagcgggagcggcagcttgtggcagccaaccagcaggagcttgaaaaacctaacggcacgaaggtccgcacgaaagcgcgtgagaaggccaggcagcggaatcacgtgatggtggcctga

SEQ ID NO: 537354 - DNA, 459 bp, Stenotrophomonas maltophilia
atgatgggtgacgtgacccctcgaatgaatggtcattggggagacggggagctcggaaagagtgagagggcgaccgtgcttcacggcatccatttcatcagtccctcggtgggtggcccgctattcaacacggtgtggcttcccacgctggccgacttgcgggcgctgctcgctgacgccgacctctgcaaagcagccgaaaccgaggtgggcgcgttcattgacacgcgcgttgatccgttgcctcctgagatcgatgaggtcatttaccagccatcgataaggcagatttccagcctgccggataactatgggatcggcgtgggcgtttttgtgactgacgcttttgcgtttgtccttcagcgcatgattcaggaggcaatggctcagcaccgggcgcgtgagctggatcgggtatgggaacagtcagccaccggtggcaagcgccccaggctctaa

SEQ ID NO: 537355 - DNA, 150 bp, Stenotrophomonas maltophilia; identical to SEQ ID NO: 505935

SEQ ID NO: 537356 - DNA, 300 bp, Stenotrophomonas maltophilia
atgcaggacgtcggcggaaacctcgtcgaatgcaaccgccagtgcttccagcctatctccgcctgcgataccaagcgtgtggtggaagaagttacacggggggagcgttggatgttcggacagagcgcgtgcacctcgctccatcgcacgggcttggcgctccgcacactccggtatcagctcagcgtggctttgccggacgtaagcaaccaggccatcacagacctgctgccgcttcttaggcctgcgcggaatcccagcctcccaagttttggcggacaccttaaaaatcttgattaa

SEQ ID NO: 537357 - DNA, 732 bp, Stenotrophomonas maltophilia
atgccctcgccttgcttgagggcgatgaagtatggaatggtcagcagcagagcggcccagcctgcccagccgatgaggctcactaggaaggtcgccaaaacgccgatcacggggaaggcgagatacatcaagggagtggccaggctgtcgccgccctgccccatgtcgttgccctgcaggaagccctcggcacgccgtccaagcttcgtcgtgatgatccgcgattgggtgtcacgcaaatcttccggaaccttcggccaccactcctggaattcgtcctcgctgcgtccatcgggcaccttgaacacttgggcgttctcgtcccagacggcgccgcactccagcgcgaaatctctgtcagcgtccggcacatcgagctctcgactgcgaacgcgatcggtcacgtcaaagcgccccacgaggttttcatactcctcattggatttgacgatgatttcttccttcacgctcgaaggctctccgctcttccgtcggaacttgcgccccaggccgctcgtgcagtcaagcacgttcaacaaactgattgctgccatctctgtctccctcccctgtcaaatcaacgaagccaatgcgccaagacggcaagcaccaagcaaagcggcgcgcacgccagaaagcccgctttggccacccagcgctctgcgacctgctcaaccttgctcgcgtagagccgatccttggtccatgcgtcatacgcggcgtcgtctctga

SEQ ID NO: 537358 - DNA, 2346 bp, Stenotrophomonas maltophilia
atgcgctacatcgagagcaaggtagagacccggcgcggaagagcggggaaagacgttatagacacccagggattggtgtgggcagccgccgaccacgtcagcaaccggaacgtgcagtgcgacctgcacacccatcacctggccttcgggatctccaagggggaggatggccagtggggcacgttcgatgccatcgagatctaccgccaccgccacgccgcggatcacctttacaaagtggagctctacgccgcgatgaaagcgctgggctatgggattcagcgggagcgcgaggtggacgtgatggggcgcgagacgggccagattctcaccacgattgccggcatcgaccgtgagctggtgcttcagacgaagacccgccgccaggaaatcctggactacgtcaaagaacaccccaacgtcagccacgacgaggcctgcaaggccacgcgcaaaaagaaggaagaaccgccgttcgagcaggtggtcaaggactggcagcaaaccttcgccaacatttcccgagaaaggccagacctggttcccaccacccagtcgctcaagcagaccaaaggccagcacctggacccgcatacgtttgacgaggtcttgcagcgcatgcacgagaacgaggcgatgttctgcgagcatgacctggtccgggagctggggatggagttcgccgggcaaaagaacgcggaggagatcctcagaatggtgaaggagttcactaaacaggatgacctggtgcgcgtgaaagccgaacaccttcacaaagacgaccgcggcacaacgttggcgcgcaagcaccgggaggatcgcttctgcgccacctggatggtcgaatgggaggccgagatcatccgtcgctcgaaggagcgggagaacgagacggacctgaagctgttccgctccaccgtagaccgggaaatcgccgcctatgagaagcgaaaggggttcaccctcacagaggagcagaaagccgccatcgatcacctcacccacggcacggccggcgtgggggtcatgtcggggttggctggcaccggcaagaccaccgtggccgaggtctacaagcagtgcttcgaagccgaaggaaagcagttgatgggcttggccgtgtcgggtaaagccgcggctaagctggaagaagagtccggcatgccctgcatgtcggttgcaaagttcttttcccagctccggcagggcaaggtggcgctgacgaagagggatgtggtggtgctcgacgaggccgggatgattgcaacgggcgacaccttgaagctgatgacctactgccagggggtgggcgccaagctgatcctgcaaggagacagtgaccagcttcagcccatcgctgcggggaatggctttgagctggcgaagatggccctgggcgacacgaagctgaccgagattcgccggcagaagaacgccggtgacctgatcaccgccaacagcttctacgagcgggaccaccaggggaaggtcaaggacatgcgccgcgggcaccgcagccgccaaggcacctttgatatgggcacagaaatcctgaacaacctcaagcaacgcaactgcatcgacgacttcggaacggaaagacaggccatcaaggcgttggtggacgattacctgaaagacaaaacgccgatggacgagaagctggtcttggcccacacgcgctctgaagtcaaagcgctcaccacgggcatccggaaggggctccaggagcaaggcgtgctggacagagaggaattcaccttccgctcgatcgtgaaagggcagtgggaggacctgacgctctcacgccgcgaccgtgtgatgttcacggcgaccaacaacgacttgggtgtcatcaacggcaccgagggcacggtggagagcattcggaaggacaagtccggtggctacgacctggtggtgcgcatcgactcctcgaacccgaaagaggacgggcgcattttggagttcaacaccagcgagcacaacgccttggcccaccggtatgcaatgaccgtccacaaggcgcaagggcaggggaaatccgaggtttaccacttggccacgaacatgggcatgctcgaccagcagtcggccttggtggcgttcacccgcctcaccaagggcagctaccgcatgtatacgacggacgacgtgatggagcgcatggccgaacgcttgggcaccgagcgacacaaagaaatggcgctgagcgtcggcttgtccgagacccaggctgctccggtgcgcaacctggtccaggacgtggaagagctgttggcaggattgaaaccgcaaacccaggtgccagtggagaagcaacgaggcgcgatgctcactcggtga

SEQ ID NO: 537359 - DNA, 216 bp, Stenotrophomonas maltophilia
atgaccgatgccgccgccatatgggcatccttctaccacttggcattcaaggagatggacgccaaggaagataatggcgggcggcccaccatgtctaacgcccacatgaagtcttgcctaaagtccatcgtgaagctctttgatggagatttctctttctacactcgaggatcgaacggcgaactgattgaccacctgcatgacataggaaactga

SEQ ID NO: 537360 - DNA, 747 bp, Stenotrophomonas maltophilia
atgagagctatcacgcttgccccaccaatccggacgaagctttccagcgtcgaggcggcctctagcttggtccaacccatagatacgatcaggctcaccaggaaggttgccagaacgccgatcacggggaaggcgagatacatcaagggagtggccaggctgtcgccgccctgccccatgtcgttgccctgcaagaagccctcggcacgccgcccacgcttcgtcgtgatgatccgcgattgggtgtcgcgcagatcctccggaaccttcggccaccactcctggaactcgtcctcgctgcgtccttcgggcactttgaacacctgggcgttgtcgtcccagactgcgccgcattccttcgcgaaatcccgatcagcctccggcacatcgagctctcggctgcgaacgcgatcggtcacgtcaaagcgccccacgaggttttcatactcctcgttggacttgacgatgatttcttccttcacgctcgaaggctcgccgctcttccgtcggaacttgcggcccaagccgctcgtccagtccagcacgttgaataaactgattgctgccatctctgtttccctcccctgtcaaatcaacgaagccaatgcgccaagacggcaagcaccaagcaaagcggcgcgcacgccaggaagcccgctttggccacccagcgctctgcgacctgctcaaccttgcttgcgtagagccgatccttggtccatgcctcatacgcggcgtcgtctctga

SEQ ID NO: 537361 - DNA, 1326 bp, Stenotrophomonas maltophilia
atgtcggggttggccgggaccggcaagaccaccgtggctgaggtctacaagcagtgcttcgaagccgaagggaagcggttgatggggctggcagtcggtggcaaggccgccaagaagcttgaagaagagtccggcatgccctgcatgtccgtggcgaagttcttttcccaggtgcgtcagggcaaagtggcgctgacgaagagagatgtggtggtgctcgatgaagccggcatggtggccaccgatgacaccctgaagctgatgacctactgccagggggtgggtgccaagcttgtcatgcagggagacagtgaccagcttcagcccatcgccgcgggcaacggctttgagctggcgaagatggccctgggcgacacgaagctgaccgagatccgccggcagaagaacgccggtgacctgatcactgccaacagcttctacgagcgggaccaccaggggaaggtcaaggacatgcgccgcgggcaccgcagccgccaaggcaccatcgacatgggcacagaaattctggagaacctcaagcaacgcaactgcatcgacgacttcggaacggaaagacaggccatcaaggcgttggtggacgattacttgaaagacaaaacgccgatggacgagaagctggtcttggcccacacgcgctctgaagtcaaagccctcaccatgggcatccggaaggggctccaggagcaaggcgtgctggacaaagaggagttcaccttccgatcgatcgtgaaagggcaatgggaggacctgacgctctcacgccgcgaccgtgtgatgttcacggcgaccaacaacgatttgggcgtcatcaacggcaccgagggcacggtggagagcatccggaaggacaaatccggtggctacgacctggtggtgcgcatcgactcttcgaacccgaaagaggacgggcgcatcctgaagttcaacaccagcgagcacaacgccttggcccaccggtatgccatgaccgtccacaaggcgcaaggacagggaaaatccgaggtttaccacttggccacgaacatgggcatgctcgaccagcagtcggccttggtggcgttcacccgcctcaccaagggcagctaccgcatgtatacgaccgacgagatgatggagcgcatggccgaacggctgggaaccgaacggcacaaggaaatggcgctgagcgtgggactgtccagcaagcaggcggacccggtgcgcaacctggtccaagaagtggaagcgctgctggccgggttgaaatccgaaaccgaggtgccaatctcgaacgcggaacggcgcgagatgaggcttacccggtga

SEQ ID NO: 537362 - DNA, 807 bp, Stenotrophomonas maltophilia; identical to SEQ ID NO: 537348

SEQ ID NO: 537363 - DNA, 267 bp, Stenotrophomonas maltophilia; identical to SEQ ID NO: 537349

SEQ ID NO: 537364 - DNA, 462 bp, Stenotrophomonas maltophilia
gtggtgtgccaagtgcagatgggagcgacccgggacaagctggccagccagctcggcaagcggaaagtcgcgtggcgcgggcacgaggacaaagcccaagtccacgaagaaagccgcgccttggtttccagcggtgagctcaccgaccggctgggtttccgcaaaggcaagcgctacggtcccgagaggtggggcatcgaggcgatcgtgcagatgggcggggacgtcctgttgctgacatggccagggaaaaaccatccaacggttcgcgaggggcaggtggccgctgcgtggaccaccaagcccgccggtcctgttgctgagactgaaggaccgccgccggcatcgtcccctgcacacggtgatgcgccggccttcccaaccaccgccgaaggcatcgatgcggtgcagcgggtgctgaccatgacacccgaggaaatcgacgcgcttttcaagcggtga

SEQ ID NO: 537365 - DNA, 462 bp, Stenotrophomonas maltophilia
gtggtgtgccaagtgcagatgggggccacccgcgacaagctcgccagccagctcggcaagcggaaaatcgcgtggcgcgggcacgaggacaaagcccaggttcacgaggaaagccgcgccttggtttctagcggtgagctcaccgaccggctgggcttccgaatgggcaagcgctacggtcccgaggggtggggcatcgaggcgatcgtgcagatgggcggggacgtgctgttgctgacatggccagggaaaaaccatccaatggttcgcgatgggcaggtggccgctgcgtggacgaccaagccagccggcccggtggccgagggtgaagggccattgccggcagcgtcccctgcaagcgctggcgcgtccgccttcccaaccaccgccgacggcatcgatgcggtgcaacgggtgctgaccatgacacccgaggaaatcgacgcgcttttcaagcggtga

SEQ ID NO: 537366 - DNA, 285 bp, Stenotrophomonas maltophilia
atggcgatcctttcggttgatcccgtggcagcgaaaatcaagaccctacgggacaagcaccatgcccacctggaaatgcggaagttggacgaggagcccggcgcctttgacatcaacacgcttgggttgaccttcaatgaggtcttggcttttggtgatcgttgccaagccacagtggccgagcttgggctgctcttgaccggaaccagttgggatccacagcaatacgcgtcggttcacgaagcccaaggcaaggcgatgtggaaaaccctggctggggtttga

SEQ ID NO: 537367 - DNA, 276 bp, Stenotrophomonas maltophilia
ttgaagccggacgtggtgtttttcggcgaaaacgtgccccgcgagcgggtggaggcggtgcacgagcacctgcagcaggccgacgccgtgctggtggtgggctcgtcgctgatggtctattccggcttccgcttcgtgcaggcggcggccaaagcaggactgccggtggcggcgctgaaccgtggccgcacccgtgcagacgacctgctgcagttcaaggatgaacgcgattgtgctgaggcgctggcgtcggttatcgaaccatcggctgggtag

SEQ ID NO: 537368 - DNA, 447 bp, Stenotrophomonas maltophilia
atgacgtctgtgtcgggtctgcgaaaggcaatgcaggggggactgctgagcctggccatggtcctgctggccggagccgtgcatgcagcaccggatccggtgctggtgctgggccggatcagcgatgacccccaggctcactacgagcagctgcaacccctgctggactacgtggtggcgcgcatgcatgacgtcggcatccaggaggggcgggtactgatggcccgcgacccgcagcagatggccagctatctgcggcggggacgggtcgactgggtcacggaaacctccggtacggcggtggcactgggccagcgcagtggtgcgcggccgctgctgttgaccgagcgcaacggggtgcgcgaataccagacggtgttcttcgtgcgcagcgacagtcccatccagcgggtgcaggatctgcgcggccatcgcctggccctgtag

SEQ ID NO: 537369 - DNA, 300 bp, Stenotrophomonas maltophilia
atgccgacgatcacggcgtgccgacagcgcgatcagtcgcagtggggcacgcgcctgcctgcgcaactgcatggccagcgcatagccatccatgtccccgagcccgatgtcgagcaggatcacgctgcgcggtctcacggcctgctcggcaagcgcgctggcggcgtcgccagacgcgtgtacatcggcacccaggcggcgcagctgctcgctgatgacccggcgattgagggcgtggtcctccaccagcagcagctcaaccccgcccagcggcgttcccgcgccggcgctggcggttga

SEQ ID NO: 537370 - DNA, 408 bp, Stenotrophomonas maltophilia
atgcgcgatcatcagtcccaatccgctgcctccgcgctccttgccgtctccgccctgctggaatggctggaacagcacggtgagttgctctgcagtgatgccgattccgctgtcgatcacatccagcatgagctcacgagggtggttgcctggcgtcagttgaaggcgcagctcgatgccgccgacgtcggtgaacttgagtgcgtttcccagcaggttgtcgatgatctggcgcagtccttccggatcgatggcgacaatggggcagggctcggggaggcagtcgaagcgaagcgccagcccgcgctgccgagcctggggacgaattgcatccagcgattggcggcagagtcgtgcaatgtcgcaaggttctacgtgcggcttgaaggtgccgctggccaggcgtga

SEQ ID NO: 537371 - DNA, 288 bp, Stenotrophomonas maltophilia
atgtgcagccgccagcgcttctcgctgccccatgggcgccgacggctggctgagcaggtcgatcgaggcaaggactgcctgggccgaattgcgcacctcgtggctcaacatgccaatcgcgcgggcgcgggcacggccttcagcacgcaggcgcctgtgccaggcatgccacaggaacggggcgactgccaatgcggcagccagggccggcagccactgcgggggcagctgacgcatccagtccaggacgtgctccagcgaggcgggggccgcctgttgggcccatag

SEQ ID NO: 537372 - DNA, 240 bp, Stenotrophomonas maltophilia
atgttcctccagcgtaatgtcgtgcaatgcccgctcgatgcgctccagcagctggcgatcttcgtggcgcgcaagcaggtgcaggtcggtggagaaatcgctgtcgaaaggctgcaggtgcaagtgcccggcgaaatgccgacggatcaggggccgcagggtcgtttccaggccgattgccagatcggcggtgccgttttcaacagctgccagcgtggcgtgccgatcggccaggtgtag

SEQ ID NO: 537373 - DNA, 411 bp, Stenotrophomonas maltophilia
gtgcgctacaagttccatcaggatctggcggcaggtcgcctgctcgcgcagctgatgcagcgcgcaccacccccctggtcgtgcgcgtcgctggtgccggtgccgctgcatgggcggcgcctgcgccagcgcggctacaatcaggtcgccgaactgtgccggttgctgccgatgccggtctggcagggcctctaccggcgccgccacaccgcgccgcagtccgagcgcagcgcagaacagcgcagggacaacctctttgacgcattcggcacgcgcttgtcgccgccgacacggctgaccgtggtggacgatgtgatgaccaccggcagcacagtgatggaaatcgccgagacgttgcggctggccggtgccagggacgtgcgtgtatgggtgtgcgcacgggtgccgtaa

SEQ ID NO: 537374 - DNA, 123 bp, Stenotrophomonas maltophilia
atggcggagtcggaccgcggttcaagttcagagaaccgcacgttgccggtggtgccgatcctgtttgcggtcacctcgaacgtgcgcaaaatgctggcgtcatcaggtcgttgctggaactga

SEQ ID NO: 537375 - DNA, 1350 bp, Stenotrophomonas maltophilia
atgaaacagaatcgatcccaccttacacagattcaagatcaactgctcatcgtcaaacggaaattaaggcaatcaaaaaagattaccttggaggtcccgtctgacttcacgttcaatcgtgcagggataaaacatttcgacccagttttgtcgtggttcaagtgggacctccagaacgttccggtcgaaattgacctctccaagtgctccagtgccaactaccaatcaatgacacttatgctgctgtactgctggaggctttcccagcagaagtgcaccgtgagcatcacgcttgatggcgagggcgagatgaatggaagtcgagtatggaaaatgctcggcggccttggattgttcggggtcatgacggacccaaaattgaactttaagtctaacccacataagccaaccttcgctatccgaaattccgaagacttcaagttggcagccgcagctatcgacgactttacagctcaattcggtgttgagtaccaacagaccttacggtatgtactgtctgaactgatgtacaacgtactggagcatgggcgctctgattttttctaccggggtcatcgttatccgatgcctgccgtagtgcagttcacatggtacgaaaaaatgaatgagctgcattttgttgttgctgacacgggtgttggcatcaaaaaacacctcagtcaggcctatcaagggctcggtacggacgaggaagcaattcgccttgccgttcagcctgaagtctcgggtacgttcggaagtcatgacccttatagcgatcggaacaatgccggcatgggcctttacttgtcgtcaaatatcgcgaagaagttgcggggggatatgtacattggttcaggtaatggccttgtgcatatttcgccgctggacaccacgagcaaagagctaaagagttcgtggcccggaacttttgtattggtgactattcgtctggatcggggaacagagattgcactcgattcgatgatgactgagtttcgcgagcgagctagagatgaagttcaggctcgtgatcaagcgaagcggagtgaaggggttctcgttagtatgtacaactactttggcacgcgagcagaggtaaagcaggaggcaatttcttataggaataagtatctcctcccggctgtgagggaagggaagtcgattaccctagactttcgtgatgtgtcttcgtcaacgcatagcttcctcaatgccctcctcgcttctcccattcgcatccttgggctgaaggcgtacaagagaatccgaatagttaatgtaacgaatgagattcgtgaaactgtcgagtacatcctcgatgataatactaatgaaatggatatttag

SEQ ID NO: 537376 - DNA, 1974 bp, Stenotrophomonas maltophilia
atgaaaattgcttcgattcatatctacagccacgacggtcgtagacgcgacgtcaccctcaatcccgatgggctgaacatcatcaccggccttgcctcgacgggtaagtcgtccctctcggacatcgtcgagtactgcatgggtgaggacgtatgcaagattgcggaaggcttcatccgcgagaaggtgtcttggttcgcggtcaccttccagtttccacacgagcaggtgttcgtcgccaagcccaaccccaagccgggtcaggttcagtgctcgcttgcaatgatcatgcgtggcaagcagattcagacgccagatttcaacgccctaaagcacaacggtggcgatgagctagtccacgaactgctttcatctttgctgggcatcccggagaccaagacacctgttcctgaacgcagcagtcgcacaggctactccgtgaacgtcaagcacacagcgttctatctcttccagaagcagggcttggtggccagcaaggagctactgttctaccgacaggcagaggaacaccttccccagaccatccgtgacacctttgccgtcctcttcggcatctccaacgtcggcgacatggagactgaggcgaaccgacgtgcgacgcagcgcgagctgaagattgctcagaaagaactgaagctggcacaggagactgaggatgcgctggacacgcgcggcttgagcctactggctgaggcgcggactgtgggtattcccttcaacaactcgccagtccgtgtcgggccgagcacggacggagtcgagagcgacttggtcgcgtcccttcgtgaagtccttagttggcggccgggacaggtagcactcatggccgagaatgaaatggcgaagctccaggcacgccgttcaaatctgcggacagagcgccgccagatcctggaccagattgcatcggcgcagaggtacgtcaaaggcgcgtccgacttccagaccgaggcccaggagcagcgctcccgccttgagtccatcaatgcgctgccgcgttcgtcgaccggcgcgtggcaatggccgttcctgaaagaggaagacgcccgcatggatggcttcgcccaatcgctgatggccgagctatcggtcctggacggcgagcttgagcacgttggcggcgcgcgccctcgcctggatgagcacctcgcggcactcaccgaccgttccagccgactgaaggacgccatccgtgaggttgaagccgagctcaacgctgcggtcctgagcgatgagaaggcagcagtgcaagaggacgccaacgcgagcgctctgaaggttcaaggccgagtcagcttctacctggacagcttgaatccaagcaatgccattagcgtgctgaagctcaaagtcgagcggctgcaggcgaagctcgaccagattaaccagagcgtgggcgccgacgacgatgcagacgcgcgcatggaatcggtcattacccacatctctagcaccatgacctcgttggtgaaggagttcaaggcgttcttctctgagtttccgttccggctggatatgcgcaacctgaccgtggtggtgcagcgtcccggcaatccagttccgatgattcgcaccggcggtggcgcgaactggctggcgtatcacatatcggctctgctggccctgcatcactacgcatcggaaaaccacatccctattcctcgcttcctgatgctggaccagccgacgcaggtctatttcccctcgcagaccatctatgaatcggtggcgggggatacggagaaggtcaagcgcgtggacgcggacctggaggccgccaagaagctgtttgagacgctgctgaactacacgaaagcgttggtcccgggtttccagctcatcgtcaccgaacatgccaacttcgcggaagattggtttcaggacgccttggtcgaagagccgtggatgaatccgccggcgctggtgccgcaagactggcccagttggaaataa

SEQ ID NO: 537377 - DNA, 489 bp, Stenotrophomonas maltophilia
atgagggactggtcatctcgcccttttgaggagcgtaacctcttcaacccggctttctgtgcggtagtcttggttgccgccatccgcgagtacgaacgcgtcgctaggaagcccatgccctactccttgacgctgcttgttctgccgatgtgcctgcaccaggcctcgcgagaggagattctggagaacaagaggctatccgtcttgcgtgtgttcgcgcttcgcccagacttgctggtcaacttcgctgagcgggcacggtcgctgatccagtacgccacagaggccttcgcactgctcgcaagcaagggctgcatcaaggtagttgatgacggctgcatcagcctcattcccagacgggtgtcacctcagccgttgaacaccgacgacgccgagaggtgccgcgccgccgcaatcgtcctcggtcgcgatttcgcccagattaacgaccgcgtgacggtctacaccagtttgtccatccgcccatga

SEQ ID NO: 537378 - DNA, 1194 bp, Stenotrophomonas maltophilia
gtggcaacgcaaacagacaagtatgctgccggcgagcaggggctcggctacgtctatcagattcgcttcgcgctcgcgcacctaatgaagcaggacgagagccaagcactgctaatcgaggccgacgacgacgtcgaactgagagacgtagagggtaaaaagacgctgatttcgctgaagcacaagcaggtcggcgagaccgtcggcacgctgtcgaccgatttttggaaatccgtccgtatctggctcgaccggtacatccgcgacggcaacctcgcctgcgaccactcatattgcatggcaacgacggcgcgcgtaggtccaacctcactgcttcggtatttcctagccggcgccgatgctaagccggcggactttgcaaagcagcttatcgctgagctcaagggctcgaaggcggcgctgagtgcccagattgacatctcgttcagctcgttgacctctgcccaacaggacgacttcctggcccgtatcgtgattgccgacagttcgctgcggatcatggagctcgacgccgcctttgcccctctgctgcgatcggtggcggagaaattccgcgtcgatgtccgcgaacgcattgaaggttggtggctcagggaggccattgagctgattcagggtgagcgcaagcccatcaccggcgccgaggtctgggcgaagttcgcgcaggtcaacagcgagtactacgacgagcgtctgccaatcaccttcgacgacgcgtacccagaccaggaaatcgacgcgatgaaagacacgcgtcagttcgtcgagcagctgcgagcgattggcatgtccagcgacagcttagagatggccattctggacttctaccgcgcgttctcccaacgcgcacactggacccgagttaacgcccttgtgggcggcgagattcggaagtttgagctgcgcctaatcgaagaatggaagcgcgccagaggttgggctatggtgaaggcgcctcagaacgaggccgatttccaggctgcaggtcgccagctatatgactgggctgagaaccagtccaagggcttgcaaatccgcaaagacgtcacggaggatttcgttcgccgcggcagctttcacatcctcgcagacgagaagccactgcctcgtgtgcactggcatccccagttccttgagcgcctgaaggctgccacggccaaggtgcctgcatga

SEQ ID NO: 537379 - DNA, 1293 bp, Stenotrophomonas maltophilia
atgaacaccttcttgctacctgtccaacccttatcgtttggaactgtagagaccgagtcgctctcttccttctactccagagtggcgattcttcacggatatggcagctcgcaactcctccgagcgctgcgaggcgccttcaatccagacgccgccgctgacggcgaatccaggctctacacgggcaatgggctcaatggctcaggtcagtgggtaaggggagtttcggatctcctagaacgggggcttggcagaaccgatctcagccggctcacgctgttcgcgcttccggcacacctccccaggacgggacggagcgtgcgtgctggaacaaagaacatcgcacgtctacgcacttggtgcgagatgtgcttgttggaagatgcgagacaccatatcggtgcacatgatcggctgatctggaccatcagctacatcgaaagatgtccattccatcgggtgcggcttcgcgccagctgcccatcctgcttccagcctcaaaagtaccacaacatgaggctcggccttgaccattgctactcatgcagttcgtttctcgttggtgatagaagtctcatccagccggactttcatccccactacggagagcaggagtgcgtagagctggtttccgctattgcatccggagacatctccagtatcgcccccgatgttgtccccaggttctatcgcacgttggatgcgatgtgtgcgcctttgcaccgaattgataggcgcaagatgaaggagaaagtttcttctcggggagtgaagaactcttcgactttgagcaacttgatcgatatttccgtgcgacaccaagtctcgatcgcgcagcttgcgactgatcctgagcttgctgcgaaagcgtccttcggactggctctggcctgcccaggcaaagggatgcccttcgaagggcgtagttacaacgagatcatcgatgacgttcgtgcactaatggagaggggacttgctgcccccaatggaatccgcatcccaacactcgctgagatctcgacactgtttcacctgcgcagcttctcgttccgacttgagttcccagaccttgctcagagctacgtggggaaagttagacgacaggcgcaactgatgctacggcgagagacgggcatggcgctaattgagcgtcttgaccaagaaggaaaactcccatacctcaccgatggagaagtgctcagcatgctcgaggaagagctcgacatgagccacggatcagcccgcacgctgcttcgtcaatgtaggcggaggcgcaccgcccgaactccttag

SEQ ID NO: 537380 - DNA, 978 bp, Stenotrophomonas maltophilia
atgccccaccttccgagcagcatctcgaagcgtgccttctcagcacttgcaaggatcggtgagattagtgaagtttccaagccttcaatccattcattggatcaggacgagatcctcagtaacagcttcagcttccttgagtttgagatgcgcggaatgcgcgtactcctggcctgctcgcgtggcgggtacaagctggactggatagtagccatgcacctggcctaccgaacatcagggctatacgacatagtgaccgtctccgctgagagtcttctggccgcggagcgggttgcattgatgtccgccggactgtcctacatcatcatagatcgagagatcttcatcccaagtctgagcgtcaacactgccgcaagaactcccgccccccttcccagtgccaagctgtcggtggcgacacaggccgtgcttactcatgcgctcaacaacggcaagtgccgctatgagatttcagggacgttagccgaactcgcaattccgctgaagcagctcggctgtgtcagccacgagctggttcttgccggagttggcgcagtagatcgcatcagagcaaggtctcatgtcgagatggatgagtgcagtgtcacttgggcgagggtggagccaatgctgtcgactccggtcatcgaagttctacgtgttcgcacgcgttccgcggcgcgcctcggacagatgcgcatcgcaggtgaggccgctctctcttggagggggtgcagccaggacgagcatccgcgtcaccttgcaatacaccaacgtcttctgcggtcaatgggaattggcctgtcaccttatgacgcaggttcattcgccgaagttgagatctggaatcgctgcccagcgaggttgagtccgcataccactcaggttgatcccatttcgctctatctctgtaggcgccgtcacgccacgctcgctgagcttggccgacttcggcagatcatcagcgaaagatggtag

SEQ ID NO: 537381 - DNA, 648 bp, Stenotrophomonas maltophilia
atgccagagctgacggatcaacgcagcaagccttgtatcgcccgcttgcatcacggctctctttcctcccgagacgagggtgccataatgtttagaactagcctctcccatccgctgcatgtcgctacgctcgctgtaggaagtaatggcggcgctataggcgtgacattcgcgccggggaagtatcaggaggcggccatgacgggaacatggaaccgcgatctcaacgtggatctacgcgcgattcacagatggggggccacacacctgatttccctcattgagccatgggagttcgatgagctaaggatcgtggagctgcctcagcgagcagcagctctaggcatcgcatggcatgggcttccaattgtggatggtgctgctcccgacaggatcttcctgaaggaatggcaggtacttggcccagcactctgtcaggagctgctggatggacgtcgagttgtggtgcattgcaagggcggactcgggagagctggcaccattgcttgtatgttgctactggaaacggggatggctgcgactggcatgcaggccatggacctagtccgtcaggttcgacctggtgcgatcgagacacgtgagcaggaggatttcatctgcgcctggaacacagagcgtctgatatag

SEQ ID NO: 537382 - DNA, 231 bp, Stenotrophomonas maltophilia
atgagcaatcgaccgcatagggcaatcccccacctcaaagtttgcgagggagacccctcgctgggacacactccctacatcgcgttcgaggaatacttgaccattccagggcttgaggatgcagatattcgattggagttcgataacaagccgagtttggaagaggtggaagacctgcgtcgcaagctgaagagcgccggactcgtctttgtggtccagcggagaacctag

SEQ ID NO: 537383 - DNA, 723 bp, Stenotrophomonas maltophilia
atgagcgagtggagtctgtccgcacttctgtccgacttgcatgccgatatcgagaatcgtctctcaatcgcgcggcgcagtttcgcgcaccctggaacaaagggtgacgccagcgaatcagtctggatcgagcttctggaaaagtatctgcctaagcgttaccaggttgcccaagcgcacgtggtcgatagcctcggaaatttcagtgaacagatcgatgtgcttgtattcgatcgacaatattccccattcatattcaacttccaagggcagaccattgtgccagcggagagcgtctatgcggcctttgaggcgaagcagaccgtcgacgcggccctcgtcgaatacgcgcaacgaaaggtcgcttcggtgaggcgactgcatcggaccagccttccgattccgcacgccggtggcacttacgcgccgaagccaccaatcccgatcattggtggcgtgttgtctcttgaaagcgagtggaagcctgcgatgggcgacccgctacgaaaagcactttcagccgaccaaaagctcggtttgctcgatcttggatgcatcgcttctcacggccacttcgttagtcttgaggctggagcatacgattttgtccccgagcggaagccggcgacggcgtttcttttaaagctaatcgccactctacagttcagtggaacagtgcccatgattgacgttgatgcctacgcggagtggcttgccaagtga

SEQ ID NO: 537384 - DNA, 897 bp, Stenotrophomonas maltophilia
gtgatctcgattgaagacgcctttcgcaagttcaagcaccgtctggaattaaatgaccgtgagcaggctaacgctatcgctcgacaccaggaggtgcgcgatcaaatccgggataagttcaaggtcgataccgacttcttgaccggatcttacgcccgttggaccaaaaccaagcctcttaaagacatcgacatcttctttgtgttgaagaactctgaaagcgcgtatctgagcaaatcgccatccgtggtgctggatgacttctttaacgcgttaaaagagaagtatggcgatcgcgtcaaacgccagcgtcgttcactcaacgtctccttcggcgtctctgccgacggcgaagacaacaccgactaccgcgtgatgagcgtggatgtggtgccagcgttcgctaacggtgacaactatgccatccccgacgaggcacttggggagtggatcgataccaacccgaagattcatgccgacaaggcgacggctgcgcatcaagcttattctagtgaatggaagggcatcgttcggatgctcaagtattggaacaacaatccaacgcatggcgagaagccgatcaagccgtccttcctgatcgaggtgatgtgtctccaggctctccatgggggctggggtggtagtttcgagcgcgagattcaaggtgtattcgctacgcttgccgatcgtatcttcgatacgtttgatgacccggcagggcttgggcccccaataagcgacgaaatggatcaagcgcgcaagcagcgggctcagtctcttcttcgggccgccgagcgcgaagcggcggtcgcaatcgaccatgctcgccgagggcgtcagggtgaggcactacgtgcttggcgctctttgtttggcgtcaaatttccactgtcctaa

SEQ ID NO: 537385 - DNA, 504 bp, Stenotrophomonas maltophilia
atgactaccgtcgtcgtgaacacctacacgcactcagttgtctacgtcgccgacaacatattgagaagcctgaaagacatcatcaggctgagcggccttgatccggctgctttcgttggagactgggaaacgaaccaccgagccatcaaaacctggctgggcagtcaacacctgcggggcgtttggcttgagatctacaaccctgcgaccaatgcgctgattgtccgttgggatatcgagatcagctacgcgtggagcagcgaggacggcagcttctggactgataccgagcagcttcgctacgccatcctgaaggccggcctgtcgccagcgtccgcccgctactcccttcttctcgataccaagccggggcggcctgatgtgttgggttggggcactgggcacgaacgttcaaccttggggatggtgcggcaaagtctcggctctacgatcgaacacagcggccttggaggccggacttcttacctgaggaactcaacgtga

SEQ ID NO: 537386 - DNA, 468 bp, Stenotrophomonas maltophilia
atgagcgtcgttcgccgcacgtttaagagcacgccaggccgggacgcgtctgaaacttggcgggcaatctccgaactcctcttgcgcaacggcgatggatcagctcgcgctgagcttgaggcggtcgccggcattgccaccagtcttattgcggatcaggctcctcgggacgcaccgattaccgtcatctgcagtggcccgcgcacacgcatctactgcctttatgacgacgacgcgataggcggagaagacgtgaacgaggagagcatgggtttcgatccattcaaaggcgaatggtcaatttcccttccttgcccagcagatgatctgagctgggcacagcgcgccttggccaagcactccaagcgcatcacggcccgcgacctgtcagacaagcaggtggagacggcagccagctcgacaaattcctctgtgatgacgcttgatacgaaagggttcctagcatga

SEQ ID NO: 537387 - DNA, 915 bp, Stenotrophomonas maltophilia
atgcggaacttgttgccccttgatgatttgccgcaggccaaaggcatccagcgcagccggacgctaccagacgcgcctttaggcgcgctctgggattcgatcaagcttgaggagggaatcaaagagcgcctcctatcgcaggccatcttgaatttcacgcttcggcccaaggtggcacgtagcgtcttgccgatgcacggggcgattctgctcgtaggcgcgcctggaacgggcaagacgtcgctggcgaaggggctggccaatcgtgtgtcccagcttttcaagaacgaacgctttcgtctgctggaagtcgagccgcacatgctgaccagttcgaatatgggtaagacccagcgtgccgtgtctgacctcttctcacagactatcgccgaggcagcggcgctcggtccgaccatcgtgcttcttgatgaggttgaaaccctcgcagcagatcgcacgcgaatgagcctcgaggctaatccgatcgacatccaccgcgcgacggatgccgtgcttgtgcaactcgatgcgctggctgagcaatacacaaatatcctgtttcttgctacaagcaacttcccggaggctgtcgaccaagcgtttacctcgcgttgcgaccttgtgatgaccatcccgctgccaagtgcggacgcctgtagggagattctgcttgattgcctaagtggcttggcccttacttttccagccctcaatgcgctgaggagcggcgcggggcttaatgcatcagcgaaggcatgcgttggactggatgggcgtgcgatccgcaagatggtcgctagtgcgttgacgttcagcaaagaaacggctatcgacccgtcgcgcctgacgcatcaagacctccttcgtgcagcgcaggcagccaaggctgagcgcgcgggagggcgagtcgcatga

SEQ ID NO: 537388 - DNA, 900 bp, Stenotrophomonas maltophilia
atggagtcgtctggaagttccaaggtccgctggggacagaaccgtaggttgaacttcatcgatgtgcgcctgcagtatgacgggcgcatcaatcgcagcgatctgatgcagttcttcgacatttcagcgccccaggctagcgcggacttggggctgtatcagcagctggccggagacaacttggtttacgacacccggcaacggatctatctagcgacgcccgagttcaagccgattacgaagaggagcgaagccacgcgctacctgaacgaactgcagcgtctggctcgcggaatcgttgagcccgacgagagcttcgtaggctaccagccttctacaggcgtggtagtcagtccatcgcgtgcgatcgaagcagacgaggtcgcaacgctccttcgcgccatccgcgatcgcgtcgccctccgtgtccgttatcagtcgatggatgcgccggagccgcaggaatgggtgctttcgccccatgcgcttggatttaacggcctgaggtggcacgccagagcttggtgccacgcgaggcaggtctttcgcgacttcgcaatcggacgactggatgtgctagagcacgtctttagcgcgaagccagtcgatccattgctcgacgaaggctggaacaatgaagtcacagtttcgcttgtgccgcatcccggacttacaccgtcgcagaggcgcgtggtcatgcgcgattacgggatggttgacgggcactgtgagttgcgttgtcgcaaggcgatgctcttttacacactccggcatctgaacctggaaagcctcgccatttcagacgtgcccgcccagcagcatgtcgtggtcgaaaacgccgaagaggtcaagcagtggatgcgtgaggaccgcgatggacctcagcatctccggcgctga

SEQ ID NO: 537389 - DNA, 327 bp, Stenotrophomonas maltophilia
gtgcccaaggcttccccccgctcattgttcgccgcccgcctgaaacaggccagggaactgcgcggcatcgccagccagcgagcgttgggggttctgatggggcttgataagaagttggcgagcagccgggtcaaccggtatgagaccgaggtcagcgggattgatctggatgggctcgggaagttagctcagaccttgggggtgccgattgcctacctagttgccgaagacgacgctaccgccaaggtgatcttgtctttggcgtcgatgagcaaaaaagagcgcgaggaccttgcgcgagaactagagtcagccggggccagctag

SEQ ID NO: 537390 - DNA, 777 bp, Stenotrophomonas maltophilia
atgaagaagatcgagacaaggatggccgccggcctggctgccgcgctgctgttgaccgcccaaggcgtgggtgcccagacgcacccggagcaggaagaggtgcccaataggcccggctttttccgccagctcgggaccagcctgaagaacgccggccaagaaatgattggggtgaagcccaccggggccagcgggactcggtctgccggcaatgaagcgatctacaccccggtcagcggggccggaaagatccaggggctgttcaaatccgataaccaccaactcgcacaacaaggccggttggactggccccgcgtggcgttgacgttccaggaatggggggcgtctctgccctgctggacgattgaagcgcgtgtgtggaccaacccctccgcgtcgaccacggaagtactccggacctgcgccaacgcgccattgaccgaagtcgacgacctgggcgacaccgccgagctcaacaacgccgcgctctggaaaggccgcgacagcctcaccggcgtgcgggtgccgtccaacaagtccaacaccggggccagccggtccaccggccccaccccgcccagccagccgttcgtggtcaacgtgtctcgccctggcgtgtctgacaaggccgtcgacgtggccctgagggtggcatgggtctctgggttcatccagaccgccgacctgcacccgggcgcgtcggggatgctgactccgttcaaggacagccggatgtggatcgcgggatttaagccggaaggcaaccgagacaggtaa

SEQ ID NO: 537391 - DNA, 315 bp, Stenotrophomonas maltophilia
atgaaagcaccgaagcttgcctgcgcctgcttggcgaccgcttttgcactgaccgcctgcggtggcccgccctccaacacggacgcccagaaagcgctggtcaccctgctggagcagagcggggctggacgggttggcgacatccgtgacctcgaactgaccggatgcgtcgaggcccaagacatggagggctaccgctgtgacaccaaggggaaagtttccatcgatatcggcggccgccaggtgcccatcccggtcagcaaaaatcttcgatatgcgaaggagtccgggagctggaaggcctacgccaaatga

SEQ ID NO: 537392 - DNA, 666 bp, Stenotrophomonas maltophilia
atggttggtgccgtcttgatacaatcgacaatgaaagatgacacgctcatgctctcccccaaaaaaaagagcggcctatccggccgctctcgatcacctaaagtgatgttaggtcaatccaaaatcgttttcgcgattgcgcatacaacctcctctcacgttagttgccaattctcagaatcaaacctatcagatgtggcgcagccagtcaagttaaggccaattcggacctacaagcggtctgatgcctttctgaacgctggcccacgtataaagaccttggcgatcgtccaacactctgaagtgggaggcggggatctacctcgcatgccgctcaccggaagaacagtcggaaggctacactacgggacacaacacaggacacaagtccggtttgcgatctgctgcagggtcaagaggttacgttcgggtcgatccgatccccctctctccgccagacaaacgcaaaagggccgcccacagggtggcccttttgcgtttgtctggcggatgggatgggtggtgagaagccccgccggggttcgacggttctgcaggagcagaaccggacagccgcaggctggtcccggggcgcaacgcgcatcgggatcgggatcgggtgcagggatgcacccgacaatccccctctctccgccagataaatga

SEQ ID NO: 537393 - DNA, 1128 bp, Stenotrophomonas maltophilia
atgctgacggtcaccgcttccggccgctacgacaacttcaagatcgccggccataccgtagacaagcccacctacagcatcggcctcgagttccgccccttcgaaagcctgctggtccgcggcaagtacggcaccgcgttccgcgccccgtccctgcccgatgccttccagggcaagagcggctactacgccaatgggtccaaggattactaccgctgtggccagctcgggttcgatccgtccaacacggtcgactgccgctacggcagcgtgtcggtgttcggcacccagtcgggcaatccggagctgaagccgattaccgccgatgtgtggaacgcgggcctggtgtgggcgccgatcaacaacctgtcggtgtccctggactactacaactggaagatcaagaacgaggtcaacaccctcagctccgaccagttgctgctggccgagtactactgccgcaacggcctgaccaacaccgccggcgccacctgcgaggaagtggccaactgggtcacccgtgatgccaccggcgcgctggaggagatctacacgccgaagctgaacgtggcacggcagaacctcgaggcggtcactgccagcttcaagtacgtgcaggacatcggtcgcttcggttcgctgcagttctccagcaactacaccaacatgctcaagcgtgaactgcagccgcagctcaacgacccgttcctggatctgctgggcaacccgtacgcaatgtgggtgtacgactcctacgccaaggtccgggctgacggctcgatcggctgggcgatcgacaagttcaccaccacgctgtacttcaattacatcggccgcacgccgaactacctgtcctacctgggccgtggctatgactatgtcgatccgacgtccggctacaaggctggcaagtggggctcttacacgacgtacaacctgagcgtgaactaccgcgcgatggacaacctgacgttctcgctgatggtcaacaacctgttcaacaaggtgccggacaaccagcagcactcctacgcgggcaacatcgacgtgccgtacaacaactcgctctacaacgcctacgggcgcgctatctacgtccaggcccagtacgacttcggcaggaagtaa

SEQ ID NO: 537394 - DNA, 204 bp, Stenotrophomonas maltophilia
atgctgctgtccagccgcccgttggcgatgccgtcggccagcttcaccgcaccttccagcgggcgggtcaggctgcgggtgatggcccacgccgccagtgaacccagtatcaggctcagcacgccgaacacgatcgacagcgtgccggtccaggattcggttgaacggtattcctcgcggctgcgctcggtcagtgtctcctga

SEQ ID NO: 537395 - DNA, 1767 bp, Stenotrophomonas maltophilia
atgcttgatgcgaagcttgtcgggcccttccatggcatagaggtttggctgtttctggatcagctggatcaccgccatcggatcgatgttcggcttggactcaaacacgatgcggccaccgttctcacccaggtccagcttgcggatgcccagcgcgttggctttcagcttcagctcggcgatggcgaacaggtgcttggccgcatccggcagcaggccgaagcgatcgatcatctccacctgcagttcgcgcagcgcatcgctgtcgcgcgcgctggaaatacgcttgtacagggtcaggcgggtatgcacgtccggcaggtagtcttccgggatcaatgccggcacatgcagctcgacctcggcaccacgcacttcctcgccggcatccaggtcgggcagcttgccctgcttgatgctgcgtaccgcgcgctccagaagctcggtgtacaggctgaagccgacctcggccatctgcccgctctggtcctcgccgagcagttcgccggcaccgcggatctccagatcgtgcgtggccagggtgaagccggcgcccaactcgtccatcgaggcgatcgcttccaggcgcttctcagcgtcgggggtgatcgcgcggcggtcgggggtgatcaggtaggcgtaggcacggtggtgcgaacggcccacgcggccacgcagctggtgcagctgggccaggccgaagcggtcggcgcggttgatgatgatggtgttggcgttggggatgtcgatgcccgattcgatgatcgtggtcgacagcagcacgttgaagcgctgcttctggaagtccagcatcaccttttccagctcgcgctcgggcatctgcccgtgggcgatgccgatgcgcgcttccggcaccagctcggacagctcgcgctgcatgcggccgatgctttccacgtcgttgtgcaggaagtacagctggccgccacgtgccagctcgcgctggaaggcttcgcgcagcagcgcgttgtcccactgggtgatgaaggtctgcaccgccagccggttcggcggcggcgtggcgatgatcgacaggtcacgcaggccggccatggccatgttcaaggtgcgcgggatcggcgtggcggtcagggtcagcaggtgcacgttggcgcgcagcgccttcagggcttccttctggcgcacgccgaaacgctgctcttcgtcgacgatgaccatgcccaggtccttgaacttcacgtcgggctgcagcaggcgatgggtgccgacgatgacgtcgatggtgccggcggcgaccttttccagctcggccttgatctccttggtgctcttgaagcgcgacagcacctcgaccttcagcgggtaatcggcgaagcggtcgcggaagttgcggtaatgctgttcggccagcagcgtggtcggcaccagcacggccacctgcttgccggcactggcggcggcgaatgccgcacgcaccgccacctcggtcttgccgaagccgacgtcgccgcagaccacacggtccatcggctggctgctggcgaggtcgcgcagggtggcgtcgatggcggccagctgatcgggggtttcctcgaacgggaatccggctgcgaacggctcgtacatcgcacggtccacctgcagtgccaggccggcacgcgcctggcgacgggcctggatctccagcagttcggcagcgacgtcgcgaaccttttcggcggccttgcgcttggccttgctccactgctcgccaccgagcgaatgcagcggcgcggtttccgctga

SEQ ID NO: 537396 - DNA, 201 bp, Stenotrophomonas maltophilia
atgaagatcgcaggcgtggaaggcaagaagcctgacctcattcgcgacgcaatccggaagctggacgacacgaagctcggccagctggtgaccgagcttgcgttcaacactaggctcgagcagtcagcgctgcacttcgctcgaggcgagcagcgccggcggaagcgtcaggccaagaaggcggcgaaggcagccccgtga

SEQ ID NO: 537397 - DNA, 267 bp, Stenotrophomonas maltophilia
gtgaaaaacaagattgaggatctccgcgaccacctattcgccgagctcgaggacctgcgcgatcccgagaagaagttcgaccgcgaacgcacccgcgccgtggtggaagtggcgcagaccatcatcaattccgcgaaggcggaggtcgatttcatcaacgcggtcggtgcgagcaagggctctggcttcatcccggagaccccgcgatcgccaccggcattgaccgccgtcgccggcggcaagcccgccctcgaccacaaggcatga

SEQ ID NO: 537398 - DNA, 825 bp, Stenotrophomonas maltophilia
atgaggcactggtccccagcagcagaggaccgtttgcgcgagttgtacgcgacgacgacgctcgcgcggctggcgttcctcctgaagcgcacaccggcggcgatcaagtcccgcgccggtgtgctcgggctgacgaagggtatacgcgctagatggacgccggcgcaggatcagatcctgcgcactcgctacgcgacagattcggccgatgcgatcgcgcgtgacctcggctgcacgcgaacccgtgtgtatcagcgtgcccgtcggctgggcctcgcgaaaccggaggcctgggcggcgcagtgcactcgcgcccgctgggccgagggccgtcacgagaacagccgccgccagcatttcccgaaggggcacgtgccggcaaacaagggcctgcggcggccaggttattcacctggccgaatgtccgaaacccagttcaagaagggccagatgcacggtgccgcccagcacaactacgtgcccatcggcaccgagaagatcgacccaaagcgcaaggttctcatgcgcaaggtgaccgatgacccgaccatattcccagtcaagcgatggcgcccggttcatgtgctggtgtgggagcgagaaaacggacccgtacccgcagggcacatcgtcatctttcgccgcggcctgaagacgttcaaggcggaagagataacagccgacaggcttgagctcgtaacgctggccgagaacatgcggcgcaacacgatccacaactacctgccggcgatcaaggacgcgatgcgcctggtcggccgagttaaccgtcaagtgaggaagctcgaacgtgaaaaacaagattga

SEQ ID NO: 537399 - DNA, 960 bp, Stenotrophomonas maltophilia
atgaacgtcaacacatcgccagtttccattccgctggtgatctaccactcaaactgcgcggacggctttacggctgcttgggctgtccgcaagcgattcggagaacatgcccagtacgtcgccgcggtacaccagactccgccaccggacgttactggccgcgacgtcatactggtcgatttctgctacaggcccgaagtgttgcgcgcgatgtccttcactgcgcgctccatcttggtgcttgatcaccacaagagtgccgcggccgacctccccgaagagccacgtaccggggcggagttcctcaccaccatccgaatggatggacctcgctggacagcgccaacaacgtgggagtacttccaggcgtgcgtgctgcaagatcagtacgagggagtcggccgcgcgattgtctacgggctattcgacatggagcgcagcggcgccggcatcgcatgggattttttccacccaggcgttgtacgccctgcgctgatcaatcacgtcgaggaccgcgatttgtggcgcttcgcacttcccggcacacgtgaagtacaggcggcaatcttcagctatccctacaacttcgaggtatgggatgcactggccggcgcacgcctggattttctgcgtgaacagggcgaagccatcgagcgcaagcatcacaaggatgtagccgaactggtcggcgtgtgcaggcgccgcatggtcatcgctggacacgacgttcccgtggccagcctgccatacacgctcaccagcgacgccgggcacctcatggcgcagggcgagccgttcgcggcttgctactgggacaccagcgagagccggtgtttcagcctgcgagcggctgacgaagggatggatgtgtcggtgatcgcagcgctgttcggcggaggtggtcacgcgaaggcggccggcttcagggttccgcgcgatcacgagttggcgagggcctga

SEQ ID NO: 537400 - DNA, 330 bp, Stenotrophomonas maltophilia
atgagcagtctctcgattctcgtccatgcgctgcagcgcctcccgctgcgcctcaccttcaccccggcatggaattccatcaacgcgtcgctgtacctgcgtccgaccaatgccgacaggaaaatcggcatcgagaccggcaagcagctggtgttcgtcgccggcgcgcccgcgcagaggcttcgactgagcgaacccgccgacgcggctgacgactggtcggtgtggctcggcagcacggcgttcgatatcgacgccaagacgcacgcacggctgaaggcatggatcgccgacaccttcgcccccaaggacggaggcacgccgcgatga

SEQ ID NO: 537401 - DNA, 165 bp, Stenotrophomonas maltophilia
atgtccgcgctctatagcggtggcactcggcgccagctggaacatgacggcgacgaccggaccaggaccgcggtctatatcgaacgcgtgcagggcggtgaagcggaggcgggtgggatcgaacatggcccgcatcctctcgcatccggttgggggtccgcatga

SEQ ID NO: 537402 - DNA, 210 bp, Stenotrophomonas maltophilia
atgcagcccgcccgacgccgctgctacaaacccgccaacgctgcgtcgaggcgcggcattgtcgccgcgctcgcggcgctttacgacaccaccacgccggccatgaccgcggacgaggcactcgccgagcgcgagcggtttcgccgcgaaacggaggcgtcgcagcgacgccagggcgagctggtgctgcagctgaaggtacgcgaatga

SEQ ID NO: 537403 - DNA, 225 bp, Stenotrophomonas maltophilia
atgagcctgtggtgctgcacgcactatgcgatggccatatcgaagctcccgctcgaggagtgggcagacgcgatcgccaagctgccaaccgggtgcgagaagggatgtggtgggccacgatcctgtcgtgagcgcaacgccgagtatctccgcgtgcagtaccgggcgctcaagcggcggcagcaacgcgatgcacccgcgcgtcgccagggagcgctgctgtga

SEQ ID NO: 537404 - DNA, 633 bp, Stenotrophomonas maltophilia
atgaacatcatgaaggccctgcagagcctgggcacggtggggcgcgacgcagttcgtgcgatccgccaacacaaatatgaggtgtccgagtcaggtatctaccttcccgccgcgcgcgcgaccatcggcggcatcttccggaccgctcacgctcccgcgggcggtgagttcgggccgtggcaggtcgacccgaatcgactggtgaatgaggggctgaactacattctgaacaccgctttcggcggtgccagccagctgaccgccttctatctcgcgccgttcgccgggaacgtcgctccagccgccgactggaagggctctaccttcaaggacgtggctaccgagttcacggcgtacaccaacgcgaccaggcttccgtggaacgtcacgcagtccacggcccagtccatcggcaacagtgcggccttggctgcggcaacgctcgtctatgccgccggcggtccatacaacctgtatggcatcggcctcctgagtggttcggccaaaggcgccacggcgaacatcctggccgccggtacgcgctttggtacgccgcgcacgaaccagctcgcgggcgacaagctggcgatggagtacgtgctgggggccaaggacgagggcgacgtcagctga

SEQ ID NO: 537405 - DNA, 468 bp, Stenotrophomonas maltophilia
atgtatcgcctgactaccgattccgacatgctgtactgcgtcgagactggtgcattcatccctcgcggccattatttgtggccgaccgagtggctggccgcaggcaacacgccgctaccggtcccgccaccctacgagccgaacacgcctgcccaccatcgcgctatccgcgatgcagcatgggcttggatgaccggtgtggttcaggcgcgccagtacgacagcatcgagagctgcgtgggctacttcaacagtggagtcgagcggtaccggctggaagcacgcgccatggtggcctggcgggacgcggtgaacgagaagctggtcgccctggtgctggatccgccgccgggagtcgtgacatggccgcaggtccaagcactgctgccgcaaccgtcccagttcaactggccctccagcgtagagctcccgctcggggtaggtgacggccccgcagtacaactttga

SEQ ID NO: 537406 - DNA, 1074 bp, Stenotrophomonas maltophilia
atggctgctcgcgtcccactcatcctcaatcagaccactgccagggtcgaggaacttgccgcagccgataccctgctcgccggaaccatcgaagggctgcttggccgcaatcgcatcatcaatggtgacatggggatttggcagcgtggtaccagcttcaccgcgccgggctatacctctgaccgctggtacttcaatgctggcggcgtcaatagtccgtcgctgacccggaacccgatcacgccgggcagcttctccggcattgaggcccccgcactcgcaaaggtgtcctatggaaccatcaccgacgccaccaatcattttgttgtgtatgagcagctgatcgagaatgtaactacgtttgcaggtgcaactgtcaccatcagtttcaaagtgttcaacagtggcgcggcagggcgacagattgccgttgaagtgcgccagaatttcggaaccggagggagcgctactgtttcgggtatcggatctcagaaattctcgcttgtggcagggatcaacgtaatcaccctgtcggtggcaattccgtcagtgagcggaaaaactgttggggcgaataattcacttgggttcgctttttgggccactgcgggtagcgcatggaattcgcgcagcgccagcctcggtgcgcaaaccggcgacgttcatttcaccgaggtgcagatcgagcagggcgcgggtgcaacgctgttcggaaagcgccttcctatgctggagctggcgctatgtcttcgctactacgaaaagagctacaacctggacgttgtgcccggatcgattgcccaggccgggcgcgttaatcagttcttcaatcagacgcaaggcggaccttcttacggcgaggtgaggtacaccgtaaggaagcgcataccagcatcggtcgtggtgtacgcgtcagaaaccggaacgttgggaaggacgtcgggttccaacggtattgattctacctccaccacgatatcggccaacggtgaaactggttttggtgtcactactgtgaacgccgcgctcaatttcggattgtcgtttcactggacttcggacgcggagctttga

SEQ ID NO: 537407 - DNA, 285 bp, Stenotrophomonas maltophilia
atgttgaatcagcaagccggtacgaacactctggcggatccccagaccccgatcgaatccgcggtaaaggatctggcacgcaccaaccaggatctgcatatcgctgtcgagcagctggcgcgtcgcctcgcgcctgtgttggcggagtgcaagtccgacgcatctgcaccaacgggacgccccatcggcatctcgccgctgctcgaggacctgttccagcagagggacgcagcggtggccaccctcaacgtcatcaacgcgctgcacgctcagctgaccctgtga

SEQ ID NO: 537408 - DNA, 342 bp, Stenotrophomonas maltophilia
atggagaaggatccctggctcgatctcggcaataggatggtgattgccgcagcgctggctgcgattgcgaattttctgctggctgcggaagtcgctcccataggggagtggatcaacaaggtggtggccctgtcagcagctgggtttggcgtgtggatcgcctttgtcggggttttccatgtgcttccgctcaggagacctaagaccatcagaggttggttcggcattgtgttctgcgctttgatgtgcttcgcgatcctttggttcatgctcggcgccgtaggcggtgcttattgcaagcaatcgcccacaaacgcgccgtggctttgttcacgtagatga

SEQ ID NO: 537409 - DNA, 174 bp, Stenotrophomonas maltophilia
atgaacctgctcgaagaaggcgccataccgctgaagcatccgggtcagggaatctcgtctctgaaccgcccagtctggcgtacccgctttctctacctgtccgacaaggtcttcgacccgagccttcagagcggctgggtttggatgagtagcgatgagcgcatgaatccatag

SEQ ID NO: 537410 - DNA, 360 bp, Stenotrophomonas maltophilia
atggaccaagacaccgcacgacgcatcgaccagctcgagcagatcgtgactagcctccggcagcagtcagcaggcaccgccagcgccctcaataggcttgcagaatcgaccacccgctcgtttgcgaacgtagtggaaaaggcactcgtggacgatggcgcgcagatggctgagcgcgtgatcatgaccgccctccttgcaggcgccgacggagccacgaggaccaacgtacaagcggcgctacaagtcgcctatgaagcgcactcagcgaccaacccccatccgttggtgctcgaatcctttcggacgctagccgattcagtatttcctggcattgagctagcgtctgccgctgagtga

SEQ ID NO: 537411 - DNA, 390 bp, Stenotrophomonas maltophilia
atggcccgtcgacacctcagcaatcctcgcgaaggggagggcaaaggccacgggcgcgatcgccgggagctgcgcgcgctgcgggagagggtccgcgacctggaggcccaggtcgcgtcctaccagcagcccgagaacaaatcgttcgacgctgaactggagaaggtccacgcaaacatcgctctgatcgaggaccaggcggcgcagatggtcactcagcggcagacgctagctcaatgccaggaaatactgaatcggctagcgtccgaaaggattcgagcaccaacggatgggggttggtcgctgagtgcgcttcataggcgacttgtagcgccgcttgtacgttggtcctcgtggctccgtcggcgcctgcaaggagggcggtcatga

SEQ ID NO: 537412 - DNA, 420 bp, Stenotrophomonas maltophilia
atggccttcaccgaacgccgctgccgcatctgcggctgcaccgagctgcaggcctgccgcggtggttgctcctggatcgacaaggacctctgcagcagttgcggcgaggctgccagccatgccgcgcccgtcgtcatggggcagcgcctgctgatcgccggcaaggccatcaagctgagccgcaccgagacgctggtcatgcggacactgatctcggcaccggatcgcctggtcgagatcggcacgctgcacgccgcgatgtacccggacagtaagccgccgtcgcgcgagtccaacgtcctgcaggtgctggtctcgcgcgtgcgccgcaagctcgccgccgtaggcttccagcacaccatcgagacgatccgcctgcgcggctaccgcttcgtgatgccccaaggcggtgccgcatga

SEQ ID NO: 537413 - DNA, 246 bp, Stenotrophomonas maltophilia
atgaatccgcatcttttcggcactggccgcttctccctcgacgtcctgctgcccgccctgctggcccagccgaagcgcgctgcgagcgccgcccctgtccgtcgcatgccggtacgccaccgaaccacgtgggcaccggccggcggcggccgggccgagcgcgcccgccgcctgcgccagatcaaagccggcaccttgacccctgccggcggcctggttgcaacctacaggggcgagcaaccgtga

SEQ ID NO: 537414 - DNA, 180 bp, Stenotrophomonas maltophilia
atgtgcgtgcggggttgcaccccgcgccccgcggtagtgccggccgctggccggcaacctcaacggcaacggcggaagccgaagccgaagccgaagccgaagccgaagccggagccggagccggagccggagccggagcaacagcaacagcaacagcaacagcagaagcgggtctactga

SEQ ID NO: 537415 - DNA, 207 bp, Stenotrophomonas maltophilia; identical to SEQ ID NO: 496332

SEQ ID NO: 537416 - DNA, 471 bp, Stenotrophomonas maltophilia; identical to SEQ ID NO: 496369

SEQ ID NO: 537417 - DNA, 552 bp, Stenotrophomonas maltophilia; identical to SEQ ID NO: 496368

SEQ ID NO: 537418 - DNA, 732 bp, Stenotrophomonas maltophilia; identical to SEQ ID NO: 496367

SEQ ID NO: 537419 - DNA, 1341 bp, Stenotrophomonas maltophilia; identical to SEQ ID NO: 496366

SEQ ID NO: 537420 - DNA, 561 bp, Stenotrophomonas maltophilia; identical to SEQ ID NO: 496365

SEQ ID NO: 537421 - DNA, 564 bp, Stenotrophomonas maltophilia; identical to SEQ ID NO: 496364

SEQ ID NO: 537422 - DNA, 969 bp, Stenotrophomonas maltophilia
atgttcgagctgatacgccagcagtttctgttgcgcggtgttttccaacccgcgcacctgtttgatgaacaactcggccgcatcgtccagtgtcttggcatgttgggcgcgaatgaaaatagtggccagcgcatagcgcttgtccggagccaattcggccaactcgctggcgtcgtacgcacgagccattgcacggaattgtttgagcttggggaccggcacttcgattggcggcagctgctcggccaattgctgcagcatgcggatgtgctgcagatagaaccgaacctccttgttggtcgggcggccaggctcgcgcttgagcgagtgccagccggtgaacctagacccttccggtgcgcgcagcagttcatcaatgagcgtgcgcgtggcaggcgtcagtgtatggctgatgctgcggtagtaccccaaattgaccctctcgcgggcaccgatggcggccagctccagggtgcggaagcctggcagttcgtagcgatggtgcaccagttcttcgagcaggacgttcacgatgtccggaatcgtatgcttggtctgggctgcggcgatggccaccgtatccagccaagccacgcccgatttgtccaaggggcataccccaatgaactgccgaagctgcggcatgtgccggcgcttgctgccggaggcgtcatagcgttcgagctggtcggagtccagtacgcgcccgagacgggcggccttggcgatgtgctgccggatccgctcgggtacttcggccaacagcgtgaagtagcccaagcgctggaagagcttgagatgaatcagcaccgccagttgcgggcccggctgggtggtcagctgtttggcgaatgcaatctcaacggcggtcggggtatagatctcctccagttccttggcggtgggatcaggcttcagtcgcgggtaggcggtctcgtgaagggtagccattggatccggaggttgtga

SEQ ID NO: 537423 - DNA, 432 bp, Stenotrophomonas maltophilia
gtgacccgcctgtcccgcccgcagcgtcttctgctccagctcgccgtcctggcgacgctgctgatggtgcttgcgccgctggtcagccgcgcgctgcaggcgccgccgatggaccacaccgcaatggcgggcatggaccacgccgccatgggtcacgacatgcatgacatggccatggccgggcacgatcagcacggcgccgcgccggcagcgcccagccccgcggccgatccccacgccatgcatggcgaagcctgcgaatactgtgtactggccatgcgcctgctgtcagggctggcggtgctggtgctgctgttgccgttgctgtggcggccgcgcctggtgttcccgtggtcgcaacaggtgctgcccgtaccgcactggcccgcacacgccgcacgtgggccaccgcgcgtctccatcgtccgctga

SEQ ID NO: 537424 - DNA, 1107 bp, Stenotrophomonas maltophilia
atgctggctcgtatcgcttcgaccctggcccttggcctcagcctggccgtgttggccgggtgcgcaggcaaacaggaggccgccgcgcgtcggcagggcgaagcagtgccggtcacggcgcaggtggtgcagcccacgcagtggaacgacaccctgcaggcgctgggcacggccaaggcgcgcgagtcgatcagcgtcaccgccaaggtcagcgaaatcgtcgagaaggtgcatttcgaaagcggccagcacatcgccgccggcgcaccgatcgtgacgctgcgcgggcaggcccaggaagcggcgctggtgcaggcgcaggccaccttccacgaggccgaccagttgtacaagcgccagcgcgagctggcctcccagcggctggtgtccagcgccacgctggatacgcagaagtcgatccgtgatgccgccgaggcgcgcgtgatgcagatgcaggccgacatcggtgatcgccgtgtgcgcgcaccgttcgccggcgtgctcggcatccgccaggtcagccccggctcgctggtgaccccgaccacggtcatcgctacgctcgacgacatcgagcacatgcacatcgatttccaggtgccggaagtggaactggccgccctgggcgtcggtgacaaggtcagcgccaccagcgtggcgtggccgggccgcaccttcgagggcgtggtcagtaccatcgacgcacgcatcgacccggcgacccgtgcagtgaccgtgcgcggcgatttcgccaacagcgaccacgcgctgcgcccgggcatgctgctggacgtgcgcctgttccgccccgagcgcccggcgctggtggtgccggaaatcgccgtggtgcaggtgggccgcgacacgttcgtgtaccgcatcaagagcgacgacagcgtcgagcgcgtggacgtggtgaccggtgcgcgccgcgccggcgtggttgagatcaagcagggcctggaagccggccagcgtatcgtggtcgatggcaccggcaagctgcgcccgggtttgaaggtcgcggccaaggatgcggccccggccagcggtgccaagccggcggatgcaccggtgccggtcgcggccgagggccacggcggatga

SEQ ID NO: 537425 - DNA, 3126 bp, Stenotrophomonas maltophilia
atgaagctgtccgacatctccatccagcggccggtgttcgccgtggtgatgagcctgttgctgctggtgctgggcgtgatgtccttcacccgcctgaccctgcgcgaactgcccgccatcgatccgccgatcgtgtcggtgtcggtggactacaccggcgcctcggcggcggtcatcgaaagccgcatcacccaggtgctggaagatgcgctggccggcatcgaaggcatcgatacgatcaatgcgcgcagcaccaacggccgctcgcaggtcagcatcgagttcacctccaaccgcgatatcgaagcggcggccaatgacgtgcgcgatgcggtcagccgcgtcgccgaccgcatgccagaagaagcgcgtccgccggaaatcgccaaggtcgagagcgatgccgacccgatcatatggttcaacatggtgtcctcgaccatggacacgctggagctgagcgactacgccgaccgctacgtggtcgatcgtttctccagcctcgatggcgtggcccaggtccgcatcggtggccgccagcgctatgcgatgcgcatctggctggaccgtgaccagctggccgcgcgcgggctgaccactggcgatgtggaaaccgcactgcgcaacgagaacgtggaattgccggccggccgcatcgagtcgaccgaccgtgacttcaccctgcgcgtggagcgcaactacatcaagccggaagactttgcgaccatcccgctgggcaagggccgcgacggttacgtggtgcgcatgggcgacgtggcgaagatcgaactggcttcggccgagcgtcgcgcgtactaccgcagcaacggcgagccgggcatcggcctgggcatcgtcaagacctccactgccaactcgctggacgtggcgcgtaccgcgcgcgctgaagccgagcgggtggcgctgaccctgcccaagggcacgcagatcttcgtcgccttcgacaacaccaccttcatcgaagcggcggtggatcgcgtctacgccacgctggtggaagcgatgatcctggtgctggcggtgatctggctgttccttggcagtttccgcgctgcgctgattccggccgtgaccgtgccggtctgcctggtcgcggcgttcatcgcgctgtatgcgttcgatttctcgatcaacctgctgaccctgctggccctggtgctgtgcatcggcctggtggtggacgatgcgatcgtggtggtggaaaacgtgcagcgccgcatcgacctgggcgagcccccgctggtggcctccaagcgcggtaccacgcaggtcgccttcgcggtgatcgccaccaccgccgtgctggtggcggtgttcctgccggtcggtttcctggaaggcaataccggccgcctgttccgcgaactggcggtggcgctggcggcagcggttgcgttgtccgcgttcgtggcgctgacgctgacgccgatgatggcctccaaactgctcaagccgcacaccgggcaggcaccgcgcggcctgcatggcttcgtcaaccgcaacctggagcgcctggcctccggctatggccgcgtgctcgaccatcacgtggaccgcacctggatctacctgctggtgatggtggctgcgctggccgccagctggggcctgctgaaactgctgccgtcggagctggcgccggccgaagaccgcggttcgttccagatcatgatcgacggcccggaaggcgccggctacgactacaccgtgcagcaggtacagcaggtggaagcgctgctggccgctcacgtcggcccggacaagccgatcgtgcgtgccaacccccgcgtgcccggcggcttcggtgccagcgaggaaatgcacaccggccgcgtcagcatcttcctgcagccgtggcgccagcgcagcgaggccacgccggacgtggccaacgcactgcagaaggaactggacaccatccgcggcgtgcgcgtgcgtacgcaggtgggcggcgggctggtgcgcagtggtggccagccattccagatcgtgctgggcggcccggaatacgccgagatcgcgcagtggcgtgaccgcatcctgctgcgcatggccgacaatccgggcctggtcggcccggattcggactacaaggaaacccggccgcagatgcgggtgaacatcgaccgccagcgtgcggcggatctcggcgtgccggtcaccgcgatcggttcggcgctggaaaccatgatgggttcgcgtcgcgttaccaccttcgtcgacaacggcgaagagtacgacgtgctggtgcaggccggtcgcgatggccgtgccagcccggccgacctggctgcgatccgtgtgcgtgccacctccggcgaactggtgccgctgtccaacctggtcacgctcagcgaagtggccgaggcgggcacgctgaaccgcttcaaccgcctgcgctcgatcaccatcaccgccggcctggcaccgggctatccgctgggtgaggccatcgcctgggcgcagaacgtggcccgcgaggaactgccgcagtacgcgcaggtgaactggaagggcgaatcgcgcgagtaccagagtgcgggtggcgcggtgctgctgaccttcgccatggccctgctggtggtttacctggtgctggccgcgcagttcgagagtttcatccacccgctcaccatcatgctgaccgtgccgctgggcgtgctcggtgccttggtcgggttatgggtgagcggcggcacggtgaacctgttcagccagatcggcatcgtcatgctggtcggcctggcagcgaagaacggcatcctcatcgtcgaattcgccaaccagctgcgcgacgacggaagaaccgtgcgcgaggcgatcatcgaatcggcgatggtgcgcctgcgcccgatcctgatgacctcgatcgccaccgtggtcggcgcgattccgctggtggtggccggtggccccggctcggccagccgtggcacgatcggcatcgtgatcatcttcggcgtgactctttcgacgttcctgtcgctgttcgtggtgccggcgttctacgcgcggctggccccgtacacccgctcgccggaagcggtgaagcgagagctggagaagcaggaagccgaatcgccctcggtgggcgggcatgcctga

SEQ ID NO: 537426 - DNA, 801 bp, Stenotrophomonas maltophilia; identical to SEQ ID NO: 537101

SEQ ID NO: 537427 - DNA, 264 bp, Stenotrophomonas maltophilia
atggaagtcgaggcccttgccatcgaaaccgatgaccgcgccggacgtcatggtgattcggccatccgcgccatcaatcgccagatcatggacgacatcaccgttgatcggcggcccttggcgcgggaagcaccagcgattggaaaggtcgaacacatgcgcggcacccttggcgccatagaggtagtcatcgcgctccagcaacggcagcgattcgtctgcggactcgacatcggtagtgattacaagcgtcatatcgtttag

SEQ ID NO: 537428 - DNA, 675 bp, Stenotrophomonas maltophilia
atgtgctacctcggcggcaccgccggcgtgatgcgatacaggttcgattctggggcatggacgacgatcaacctggatggtgtaggcacgcagtatgtgcagctgggaacgccgcctgccggggtgtggaccctgaacgttgaagtggtttccggtgcttgcacgatctacggcttcgacgtccgggaatcggcggcgctgggcgttcgcatcaacaagctcggcgccggcgggtcgcggctctctgagtgggttgtgcaggatctgacgcagtgggcagcggggttctcacctcttggatccaaccttgttctggtgcttttcgggccgaacgacgcctacaactattctgctgctgcgtatgccgactacgccgcgacgctgattgaccgtatccggtcagcatcgcccttggcggacattgccttgatctctccgccgcagaatctcggcacggccacggtcacccagaagcaacaggcctacgagctccgcaaggtcgctgcggcaaagcgctgtgcccacgtggatctccagccgttctacggagagaccacggcagcctacgacggcaccgctcgcgactacatcaacatcgccgacccgcatcacccgaccgagcgcggcggctgcatcctctccgaaatcatgcttcgtttcacggcttggagctaa

SEQ ID NO: 537429 - DNA, 591 bp, Stenotrophomonas maltophilia
atggggcccattcgggtggccatgcccggagcgatgggctataaccgttggattcccgaccggagtgctcctttggccctgactaccctgaaatcccttaacgccgaaatcaaacagctcgaagcccagaagaagctggtggagaagcgcgacggcgaggtgcccaaagccctggcggtcctgcagaagtatgcgaaggtcctcagtccggcccagcggcggcaggtggccaagctcatcggggaaacgatcgacgccaagccggcgcgtgccgccaaggctgccccgggaccccgaaagggccgcaagcttggcaaggtggcgccgaagtatcgcctcccaaccggtgagacgtgggccggtcggggtttggcccccaaggtcttcaccgcgtgggccaagtccaccgagggcaaggcgtgggctcaggccaaccccggagcgaagttcccgtcggctgatgggacggtgaagaaagctcccgccagggtggccaagaagacgggcaagccggtgaagaaggccgcccagaaggccgtcaagaaacttgcgaagaatgccgtcgccaagaaggccagcaagaaggcctga
